(19) United States
(12) Patent Application Publication
(10) Pub. No.: US 2016/0289659 A1
(43) Pub. Date: Oct. 6, 2016

(54) METHODS AND COMPOSITIONS FOR MODIFYING A SINGLE STRANDED TARGET NUCLEIC ACID

(71) Applicant: THE REGENTS OF THE UNIVERSITY OF CALIFORNIA, Oakland, CA (US)

(72) Inventors: Jennifer A. Doudna, Oakland, CA (US); Samuel H. Sternberg, Oakland, CA (US); Mitchell O'Connell, Oakland, CA (US); Benjamin Oakes, Oakland, CA (US)

(21) Appl. No.: 15/036,298

(22) PCT Filed: Dec. 11, 2014
(86) PCT No.: PCT/US14/69730

§ 371 Date: May 12, 2016

Related U.S. Application Data
(60) Provisional application No. 61/915,432, filed on Dec. 12, 2013.

(51) Int. Cl. C12N 9/22; C12Q 1/68; C12P 19/34; C12N 15/113

(52) U.S. Cl. CPC C12N 9/22; C12N 15/113; C12Q 1/6874; C12P 19/34

(57) ABSTRACT

The present disclosure provides compositions and methods for binding and/or cleaving a single stranded target nucleic acid. Subject compositions include a Cas9 polypeptide, a guide nucleic acid, and a PAMmer. A subject PAMmer is a single stranded oligonucleotide having a protospacer adjacent motif (PAM) sequence and at least one of: a specificity segment positioned 5′ of the PAM sequence, and an orientation segment positioned 3′ of the PAM sequence. In some embodiments, the Cas9 polypeptide is a variant Cas9 polypeptide having reduced nuclease activity relative to a corresponding wild type Cas9 polypeptide. In some cases, methods of binding are for visualizing single stranded target nucleic acids using a detectable label. In some cases, methods of binding are for isolating, collecting, and/or analyzing at least one of: (i) bound single stranded target nucleic acids; and (ii) polypeptides associated with bound single stranded target nucleic acids.

### CROSS-REFERENCE

[0001] This application claims the benefit of U.S. Provisional Patent Application No. 61/915,432, filed Dec. 12, 2013, which application is incorporated herein by reference in its entirety.

### INCORPORATION BY REFERENCE OF SEQUENCE LISTING PROVIDED AS A TEXT FILE

[0002] A Sequence Listing is provided herewith as a text file, “BERK-232WO-SeqList_ST25.txt” created on Nov. 30, 2014 and having a size of 7,710 KB. The contents of the text file are incorporated by reference herein in their entirety.

### Introduction

[0003] RNA-mediated adaptive immune systems in bacteria and archaea rely on Clustered Regularly Interspaced Short Palindromic Repeat (CRISPR) genomic loci and CRISPR-associated (Cas) proteins that function together to provide protection from invading viruses and plasmids. In Type II CRISPR-Cas systems, Cas9 functions as an RNA-guided endonuclease that uses a dual-guide RNA consisting of crRNA and trans-activating crRNA (tracrRNA) for target recognition and cleavage by a mechanism involving two nuclease active sites that together generate double-stranded DNA breaks (DSBs).

[0004] RNA-programmed Cas9 has proven to be a versatile tool for genome engineering in multiple cell types and organisms. Guided by a dual-RNA complex or a chimeric single-guide RNA, Cas9 generates site-specific DSBs within double-stranded DNA (dsDNA) target nucleic acids, which are repaired either by non-homologous end joining (NHEJ) or homologous recombination (HR). Thus, the Cas9 system provides a facile means of modifying genomic information. Catalytically inactive Cas9 alone or fused to transcriptional activator or repressor domains can be used to alter transcription levels at sites within double-stranded DNA (dsDNA) target nucleic acids by binding to the target site without cleavage.

[0005] The systematic interrogation of genomes and genetic reprogramming of cells involves targeting sets of genes for expression or repression. Currently the most common approach for targeting arbitrary genes for regulation is to use RNA interference (RNAi). This approach has limitations. For example, RNAi can exhibit significant off-target effects and toxicity. Furthermore, this mode of repression relies on the function of a number of endogenous host proteins and therefore can lead to phenotypic effects distinct from the intended effect.

[0006] There is a need in the art for methods of controlling the expression of RNA (e.g., mRNA, rRNA, tRNA, microRNA, etc.) with minimal off-target effects and in a manner that does not depend on host proteins. Additionally, there is a need in the art for a technology that allows precise targeting of nuclease activity (or other protein activities such as binding) to single stranded target nucleic acids (e.g., ssRNA, ssDNA, mRNA, rRNA, tRNA, microRNA, etc.). Cas9 can require the presence of a protospacer adjacent motif (PAM) sequence in the target nucleic acid that is adjacent to the targeted sequence. There is a need in the art for methods that facilitate the sequence-specific targeting of Cas9 to a target site within a target nucleic acid in a manner that does not depend on the presence of a PAM sequence in the target nucleic acid.

### LITERATURE

[0007] Chylinski et al., RNA Biol. 2013 May; 10(5):726-37; Jinek et al., Science. 2012 Aug. 17; 337(6096):816-21; Ma et al., Biomed Res Int. 2013; 2013:270805; Hou et al., Proc Natl Acad Sci USA. 2013 Sep. 24; 110(39):15644-9; Jinek et al., Elife. 2013; 2:e00471; Pattanayak et al., Nat Biotechnol. 2013 September; 31(9):839-43; Qi et al, Cell. 2013 Feb. 28; 152(5):1173-83; Wang et al., Cell. 2013 May 9; 153(4):910-8; Auer et. al., Genome Res. 2013 Oct. 31; Chen et. al., Nucleic Acids Res. 2013 Nov. 1; 41(20):e19; Cheng et. al., Cell Res. 2013 October; 23(10):1163-71; Cho et. al., Genetics. 2013 November; 195(3):1177-80; DiCarlo et al., Nucleic Acids Res. 2013 April; 41(7):4336-43; Dickinson et. al., Nat Methods. 2013 October; 10(10):1028-34; Ebina et. al., Sci Rep. 2013; 3:2510; Fujii et. al, Nucleic Acids Res. 2013 Nov. 1; 41(20):e187; Hu et. al., Cell Res. 2013 November; 23(11):1322-5; Jiang et. al., Nucleic Acids Res. 2013 Nov. 1; 41(20):e188; Larson et. al., Nat Protoc. 2013 November; 8(11):2180-96; Mali et. al., Nat Methods. 2013 October; 10(10):957-63; Nakayama et. al., Genesis. 2013 December; 51(12):835-43; Ran et. al., Nat Protoc. 2013 November; 8(11):2281-308; Ran et. al., Cell. 2013 Sep. 12; 154(6):1380-9; Upadhyay et. al., G3 (Bethesda). 2013 Dec. 9; 3(12):2233-8; Walsh et. al., Proc Natl Acad Sci USA. 2013 Sep. 24; 110(39):15514-5; Xie et. al., Mol Plant. 2013 Oct. 9; Yang et. al., Cell. 2013 Sep. 12; 154(6):1370-9.

### SUMMARY

[0008] The present disclosure provides compositions and methods for binding and/or cleaving a single stranded target nucleic acid. A method of cleaving includes contacting a singled stranded target nucleic acid with (or introducing into a cell) a Cas9 polypeptide, a guide nucleic acid (e.g., a dual guide RNA, a single guide RNA, an RNA/DNA hybrid guide RNA, etc.), and a PAMmer. A subject PAMmer is a single stranded oligonucleotide having a protospacer adjacent motif (PAM) sequence and at least one of: (i) a specificity segment, positioned 5′ of the PAM sequence, having a nucleotide sequence that is complementary to a first target nucleotide sequence in the target nucleic acid (i.e., the target site); and (ii) an orientation segment, positioned 3′ of the PAM sequence, having a nucleotide sequence that is complementary to a second target nucleotide sequence in the target nucleic acid (i.e., the orientation site). A method of binding includes contacting a singled stranded target nucleic acid with (or introducing into a cell): (i) a variant Cas9 polypeptide having reduced or undetectable nuclease activity relative to a corresponding wild type Cas9 polypeptide; and (ii) a guide nucleic acid. In some cases, a method of binding includes contacting a singled stranded target nucleic acid with (or introducing into a cell): (i) a variant Cas9 polypeptide having reduced or undetectable nuclease activity relative to a corresponding wild type Cas9 polypeptide; (ii) a guide nucleic acid; and (iii) a PAMmer. In some cases, methods of binding are for visualizing single stranded target nucleic acids using a detectable label. In some cases, methods of binding are for isolating, collecting, and/or analyzing at least one of: (i) bound single stranded target nucleic acids; and (ii) polypeptides associated with bound single stranded target nucleic acids. In some cases, methods of binding are for isolating, collecting, and/or analyzing bound single stranded target nucleic acids. In some cases, methods of binding are for isolating, collecting, and/or analyzing a polypeptide (e.g., polypeptides) associated with bound single stranded target nucleic acids.

[0009] In some cases, the sequence of the target nucleic acid that is targeted by the specificity segment of a PAMmer is within 20 or less nucleotides (nt) of the sequence targeted by the orientation segment of the PAMmer (e.g., 18 or less nt, 16 or less nt, 14 or less nt, 12 or less nt, 10 or less nt, 9 or less nt, 8 or less nt, 7 or less nt, 6 or less nt, 5 or less nt, 4 or less nt, 3 or less nt, 2 or less nt, 1 nt, or 0 nt). In some cases, the sequence targeted by the specificity segment of a PAMmer is immediately adjacent to the sequence targeted by the orientation segment of the PAMmer. In some embodiments, 20 or less nt are present in the target nucleic acid between the sequence targeted by the specificity segment of the PAMmer and the sequence targeted by the orientation segment of the PAMmer (e.g., 18 or less nt, 16 or less nt, 14 or less nt, 12 or less nt, 10 or less nt, 9 or less nt, 8 or less nt, 7 or less nt, 6 or less nt, 5 or less nt, 4 or less nt, 3 or less nt, 2 or less nt, 1 or less nt, or no nt).

[0010] In some cases, the sequence of the target nucleic acid that is targeted by the orientation segment of a PAMmer is within 20 or less nucleotides (nt) of the sequence targeted by the targeting segment of the guide nucleic acid (e.g., 18 or less nt, 16 or less nt, 14 or less nt, 12 or less nt, 10 or less nt, 9 or less nt, 8 or less nt, 7 or less nt, 6 or less nt, 5 or less nt, 4 or less nt, 3 or less nt, 2 or less nt, 1 or less nt, or no nt). In some cases, the sequence targeted by the orientation segment of a PAMmer is immediately adjacent to the sequence targeted by the targeting segment of the guide nucleic acid. In some embodiments, 20 or less nt are present in the target nucleic acid between the sequence targeted by the targeting segment of the guide nucleic acid (i.e., the target site) and the sequence targeted by the orientation segment of the PAMmer (e.g., 18 or less nt, 16 or less nt, 14 or less nt, 12 or less nt, 10 or less nt, 9 or less nt, 8 or less nt, 7 or less nt, 6 or less nt, 5 or less nt, 4 or less nt, 3 or less nt, 2 or less nt, 1 or less nt, or no nt).

[0011] In some cases, a target nucleic acid is a single stranded RNA (ssRNA). In some cases, a target ssRNA (e.g., a target cell ssRNA, a viral ssRNA, etc.) is selected from: mRNA, rRNA, tRNA, non-coding RNA (ncRNA), long non-coding RNA (lncRNA), and microRNA (miRNA). In some cases, a target nucleic acid is a single stranded DNA (ssDNA) (e.g., a viral DNA). In some cases, a Cas9 polypeptide is conjugated to a PAMmer. In some cases, a guide nucleic acid is conjugated to a PAMmer. In some cases, a guide nucleic acid is a DNA/RNA hybrid guide nucleic acid where the segment that is complementary to a target nucleic acid (i.e., the targeting segment) has DNA and the segment that interacts with a Cas9 polypeptide (i.e., the protein-binding segment) has RNA. The subject methods can be performed outside of a cell in vitro, inside of a cell in vitro or ex vivo, and/or inside of a cell in vivo. Also provided are kits and libraries for performing the disclosed methods.

### Features

[0012] The present disclosure features a method of cleaving a single stranded target nucleic acid, the method comprising: contacting the single stranded target nucleic acid with: (i) a Cas9 polypeptide comprising an amino acid sequence having 75% or more amino acid sequence identity to amino acids 7-166 or 731-1003 of the S. pyogenes Cas9 amino acid sequence (SEQ ID NO:8), or to a corresponding portion in the Cas9 amino acid sequence set forth in any of SEQ ID NOs:1-7, 9-259, and 795-1346; (ii) a guide nucleic acid, or a nucleic acid encoding the same, wherein the guide nucleic acid comprises: (a) a first segment that comprises a nucleotide sequence that is complementary to a first target nucleotide sequence in the single stranded target nucleic acid, and (b) a second segment that forms a double-stranded RNA duplex and interacts with the Cas9 polypeptide; and (iii) a PAMmer, or a nucleic acid encoding the same, wherein the PAMmer is a single stranded oligonucleotide comprising: (a) a protospacer adjacent motif (PAM) sequence, and at least one of: (b.i) a specificity segment comprising a nucleotide sequence that is complementary to the first target nucleotide sequence, wherein the specificity segment is positioned 5′ of the PAM sequence; and (b.ii) an orientation segment comprising a nucleotide sequence that is complementary to a second target nucleotide sequence in the target nucleic acid, wherein the orientation segment is positioned 3′ of the PAM sequence. In some cases, the contacting is carried out outside of a cell in vitro. In some cases, the contacting is in a cell in vitro or ex vivo. In some cases, the contacting is in a cell in vivo. In any of the above-mentioned embodiments, in some cases, the guide nucleic acid is a DNA/RNA hybrid nucleic acid and the first segment of the guide nucleic acid comprises DNA. In any of the above-mentioned embodiments, in some cases, the guide nucleic acid is a guide RNA. In any of the above-mentioned embodiments, in some cases, the guide nucleic acid is a dual guide nucleic acid. In any of the above-mentioned embodiments, in some cases, the guide nucleic acid is a single guide nucleic acid. In some cases, the second segment of the guide nucleic acid comprises a nucleotide sequence with 60% or more identity over a stretch of 8 or more contiguous nucleotides to a nucleotide sequence set forth in any of SEQ ID NOs: 431-682, or a complement thereof. In some cases, the single stranded target nucleic acid is a single stranded RNA (ssRNA). In some cases, the target ssRNA is selected from: mRNA, rRNA, tRNA, non-coding RNA (ncRNA), long non-coding RNA (lncRNA), and microRNA (miRNA). In some cases, the target ssRNA is mRNA and the method results in reduced production of a protein encoded by the mRNA. In some cases, the single stranded target nucleic acid is from a virus. In some cases, the single stranded target nucleic acid is single stranded DNA (ssDNA). In some cases, the Cas9 polypeptide is a variant Cas9 polypeptide that comprises a D10A mutation of the S. pyogenes Cas9 amino acid sequence (SEQ ID NO:8) or the corresponding mutation in the amino acid sequence set forth in any of SEQ ID NOs: 1-7, 9-256, and 795-1346. In some cases, the PAMmer is covalently linked to the guide nucleic acid. In some cases, the PAMmer is covalently linked to the Cas9 polypeptide. In some cases, the PAMmer comprises an orientation segment. In some cases, the PAMmer does not comprise a specificity segment. In some cases, the PAM sequence is the 5′ end of the PAMmer. In some cases, the PAMmer comprises a specificity segment. In some cases, the PAMmer does not comprise an orientation segment. In some cases, the PAM sequence is the 3′ end of the PAMmer. In some cases, wherein the PAM sequence is GG. In some cases, the PAM sequence is 5′-NGG-3′ and N can be any nucleotide. In some cases, the target nucleic acid: (i) does not have a nucleotide sequence that is complementary to the PAM sequence at a position within 10 nucleotides of the 3′ end of the specificity segment of the PAMmer; or (ii) does not have a nucleotide sequence that is complementary to the PAM sequence at a position within 10 nucleotides of the 5′ end of the orientation segment of the PAMmer. In some cases, 10 or fewer nucleotides are present in the target nucleic acid between the first and second target nucleotide sequences. In some cases, 2 or 3 nucleotides are present in the target nucleic acid between the first and second target nucleotide sequences.

[0013] The present disclosure features a method of binding a single stranded target nucleic acid, the method comprising: contacting the single stranded target nucleic acid with: (i) a variant Cas9 polypeptide, or a nucleic acid encoding the same, having reduced nuclease activity relative to a corresponding wild type Cas9 polypeptide, wherein the variant Cas9 polypeptide comprises an amino acid sequence having 75% or more amino acid sequence identity to amino acids 7-166 or 731-1003 of the S. pyogenes Cas9 amino acid sequence (SEQ ID NO:8), or to a corresponding portion in the Cas9 amino acid sequence set forth in any of SEQ ID NOs:1-7, 9-259, and 795-1346; and (ii) a guide nucleic acid, or a nucleic acid encoding the same, wherein the guide nucleic acid comprises a protein-binding segment that forms a double-stranded RNA duplex and interacts with the Cas9 polypeptide, wherein said contacting produces a variant-Cas9/target complex. In some cases, the method further comprises contacting the single stranded nucleic acid with a PAMmer, or a nucleic acid encoding the same, wherein the PAMmer is a single stranded oligonucleotide comprising: (a) a protospacer adjacent motif (PAM) sequence, and at least one of: (b.i) a specificity segment comprising a nucleotide sequence that is complementary to a first target nucleotide sequence, wherein the specificity segment is positioned 5′ of the PAM sequence; and (b.ii) an orientation segment comprising a nucleotide sequence that is complementary to a second target nucleotide sequence in the target nucleic acid, wherein the orientation segment is positioned 3′ of the PAM sequence. In some cases, the variant Cas9 polypeptide comprises at least one of: (i) an H840A mutation of the S. pyogenes Cas9 amino acid sequence (SEQ ID NO:8) or the corresponding mutation in the amino acid sequence set forth in any of SEQ ID NOs: 1-7, 9-256, and 795-1346; and (ii) W476A and W1126A mutations of the S. pyogenes Cas9 amino acid sequence (SEQ ID NO:8) or the corresponding mutation in the amino acid sequence set forth in any of SEQ ID NOs: 1-7, 9-256, and 795-1346. In some cases, the variant Cas9 polypeptide comprises at least one of: (i) D10A and H840A mutations of the S. pyogenes Cas9 amino acid sequence (SEQ ID NO:8) or the corresponding mutations in the amino acid sequence set forth in any of SEQ ID NOs: 1-7, 9-256, and 795-1346; and (ii) W476A and W1126A mutations of the S. pyogenes Cas9 amino acid sequence (SEQ ID NO:8) or the corresponding mutation in the amino acid sequence set forth in any of SEQ ID NOs: 1-7, 9-256, and 795-1346. In some cases, the variant Cas9 polypeptide comprises a detectable label. In some cases, the detectable label is a fluorescent protein. In some cases, the guide nucleic acid comprises a detectable label. In some cases, the detectable label of the guide nucleic acid is a fluorescent dye. In some cases, the detectable label of the guide nucleic acid is an indirect detectable label. In some cases, the indirect detectable label of the guide nucleic acid is a nucleotide sequence that specifically binds a labeling protein. In some cases, the labeling protein comprises a second detectable label. In some cases, the second detectable label of the labeling protein is a fluorescent protein. In some cases, the variant Cas9 polypeptide comprises a fusion partner with an enzymatic activity, and the single stranded target nucleic acid is modified as a result of the method. In some cases, in any of the above-mentioned embodiments of a method of the present disclosure, the method further comprises: isolating the variant-Cas9/target complex; releasing the single stranded target nucleic acid from the variant-Cas9/target complex; and collecting and/or analyzing the released single stranded target nucleic acid and/or a polypeptide associated with the single stranded target nucleic acid.

[0014] The present disclosure features a hybrid guide nucleic acid comprising: (i) a first segment comprising a DNA nucleotide sequence that is complementary to a first target sequence in a target nucleic acid; and (ii) a second segment that comprises RNA, forms a double-stranded RNA duplex, and interacts with a Cas9 polypeptide, wherein the Cas9 polypeptide comprises an amino acid sequence having 75% or more amino acid sequence identity to amino acids 7-166 or 731-1003 of the S. pyogenes Cas9 amino acid sequence (SEQ ID NO:8), or to a corresponding portion in the Cas9 amino acid sequence set forth in any of SEQ ID NOs:1-7, 9-259, and 795-1346. In some cases, the second segment of the hybrid guide nucleic acid comprises a nucleotide sequence with 60% or more identity over a stretch of 8 or more contiguous nucleotides to a nucleotide sequence set forth in any of SEQ ID NOs: 431-682, or a complement thereof. In some cases, the hybrid guide nucleic acid is a dual guide nucleic acid. In some cases, the hybrid guide nucleic acid is a single guide nucleic acid. In some cases, the guide nucleic acid is covalently linked to a PAMmer, wherein the PAMmer is a single stranded oligonucleotide comprising: a protospacer adjacent motif (PAM) sequence, and at least one of: (i) a specificity segment comprising a nucleotide sequence that is complementary to the first target nucleotide sequence in a single stranded target nucleic acid, wherein the specificity segment is positioned 5′ of the PAM sequence; and (ii) an orientation segment comprising a nucleotide sequence that is complementary to a second target nucleotide sequence in the single stranded target nucleic acid, wherein the orientation segment is positioned 3′ of the PAM sequence.

[0015] The present disclosure features a composition, comprising: a PAM-modified Cas9 polypeptide, wherein the PAM-modified Cas9 polypeptide is a Cas9 polypeptide that is conjugated to a PAMmer, wherein: (i) the PAMmer is a single stranded oligonucleotide comprising: (a) a protospacer adjacent motif (PAM) sequence, and at least one of: (a.i) a specificity segment comprising a nucleotide sequence that is complementary to the first target nucleotide sequence in a single stranded target nucleic acid, wherein the specificity segment is positioned 5′ of the PAM sequence, and (a.ii) an orientation segment comprising a nucleotide sequence that is complementary to a second target nucleotide sequence in the single stranded target nucleic acid, wherein the orientation segment is positioned 3′ of the PAM sequence; and (ii) the Cas9 polypeptide comprises an amino acid sequence having 75% or more amino acid sequence identity to amino acids 7-166 or 731-1003 of the S. pyogenes Cas9 amino acid sequence (SEQ ID NO:8), or to a corresponding portion in the Cas9 amino acid sequence set forth in any of SEQ ID NOs:1-7, 9-259, and 795-1346.

[0016] The present disclosure features a composition, comprising: (i) a PAMmer, or a nucleic acid encoding the same, wherein the PAMmer is a single stranded oligonucleotide comprising: (a) a protospacer adjacent motif (PAM) sequence, and at least one of: (a.i) a specificity segment comprising a nucleotide sequence that is complementary to the first target nucleotide sequence in a single stranded target nucleic acid, wherein the specificity segment is positioned 5′ of the PAM sequence, and (a.ii) an orientation segment comprising a nucleotide sequence that is complementary to a second target nucleotide sequence in the single stranded target nucleic acid, wherein the orientation segment is positioned 3′ of the PAM sequence; and at least one of: (ii) a guide nucleic acid, or a nucleic acid encoding the same, wherein the guide nucleic acid comprises: (a) a first segment that comprises a nucleotide sequence that is complementary to a first target sequence in a single stranded target nucleic acid, and (b) a second segment that forms a double-stranded RNA duplex and interacts with a Cas9 polypeptide, wherein the Cas9 polypeptide comprises an amino acid sequence having 75% or more amino acid sequence identity to amino acids 7-166 or 731-1003 of the S. pyogenes Cas9 amino acid sequence (SEQ ID NO:8), or to a corresponding portion in the Cas9 amino acid sequence set forth in any of SEQ ID NOs:1-7, 9-259, and 795-1346; and (iii) a Cas9 polypeptide, wherein the Cas9 polypeptide comprises an amino acid sequence having 75% or more amino acid sequence identity to amino acids 7-166 or 731-1003 of the S. pyogenes Cas9 amino acid sequence (SEQ ID NO:8), or to a corresponding portion in the Cas9 amino acid sequence set forth in any of SEQ ID NOs:1-7, 9-259, and 795-1346. In some cases, the guide nucleic acid is a guide RNA. In some cases, the guide nucleic acid is a DNA/RNA hybrid guide nucleic acid, wherein the first segment of the guide nucleic acid comprises DNA. In some cases, the guide nucleic acid is a dual guide nucleic acid. In some cases, the guide nucleic acid is a single guide nucleic acid. In some cases, the second segment of the guide nucleic acid comprises a nucleotide sequence with 60% or more identity over a stretch of 8 or more contiguous nucleotides to a nucleotide sequence set forth in any of SEQ ID NOs: 431-682, or a complement thereof. In some cases, the PAM sequence is the 5′ end of the PAMmer. In some cases, the PAM sequence is GG. In some cases, the PAM sequence is 5′-NGG-3′ and N can be any nucleotide. In some cases, 10 or fewer nucleotides are present in the target nucleic acid between the first and second target sequences. In some cases, 2 or 3 nucleotides are present in the target nucleic acid between the first and second target sequences. In any of the above-described embodiments, a composition of the present disclosure comprises a Cas9 polypeptide, or a nucleic acid encoding the same. In some cases, the Cas9 polypeptide is a variant Cas9 polypeptide having reduced nuclease activity relative to a corresponding wild type Cas9 polypeptide.

[0017] The present disclosure features a kit comprising: (i) a guide nucleic acid, or a nucleic acid encoding the same, wherein the guide nucleic acid comprises: (a) a first segment comprising a nucleotide sequence that is complementary to a first target sequence in a target nucleic acid, and (b) a second segment that forms a double-stranded RNA duplex, and interacts with a Cas9 polypeptide, wherein the Cas9 polypeptide comprises an amino acid sequence having 75% or more amino acid sequence identity to amino acids 7-166 or 731-1003 of the S. pyogenes Cas9 amino acid sequence (SEQ ID NO:8), or to a corresponding portion in the Cas9 amino acid sequence set forth in any of SEQ ID NOs:1-7, 9-259, and 795-1346; and (ii) a PAMmer, or a nucleic acid encoding the same, wherein the PAMmer is a single stranded oligonucleotide comprising: (a) a protospacer adjacent motif (PAM) sequence, and at least one of: (a.i) a specificity segment comprising a nucleotide sequence that is complementary to the first target nucleotide sequence in a single stranded target nucleic acid, wherein the specificity segment is positioned 5′ of the PAM sequence, and (a.ii) an orientation segment comprising a nucleotide sequence that is complementary to a second target nucleotide sequence in the single stranded target nucleic acid, wherein the orientation segment is positioned 3′ of the PAM sequence.

[0018] The present disclosure features a library comprising: Two or more targeting pairs, wherein each targeting pair comprises: (i) a guide nucleic acid, or a nucleic acid encoding the same, wherein the guide nucleic acid comprises: (a) a first segment comprising a nucleotide sequence that is complementary to a first target sequence in a target nucleic acid, and (b) a second segment that forms a double-stranded RNA duplex, and interacts with a Cas9 polypeptide, wherein the Cas9 polypeptide comprises an amino acid sequence having 75% or more amino acid sequence identity to amino acids 7-166 or 731-1003 of the S. pyogenes Cas9 amino acid sequence (SEQ ID NO:8), or to a corresponding portion in the Cas9 amino acid sequence set forth in any of SEQ ID NOs:1-7, 9-259, and 795-1346; and (ii) a PAMmer, or a nucleic acid encoding the same, wherein the PAMmer is a single stranded oligonucleotide comprising: (a) a protospacer adjacent motif (PAM) sequence, and at least one of: (a.i) a specificity segment comprising a nucleotide sequence that is complementary to the first target nucleotide sequence in a single stranded target nucleic acid, wherein the specificity segment is positioned 5′ of the PAM sequence, and (a.ii) an orientation segment comprising a nucleotide sequence that is complementary to a second target nucleotide sequence in the single stranded target nucleic acid, wherein the orientation segment is positioned 3′ of the PAM sequence.

[0019] The present disclosure features a method of cleaving a single stranded target nucleic acid, the method comprising: contacting the single stranded target nucleic acid with: (i) a Cas9 polypeptide; (ii) a guide nucleic acid comprising: (a) a targeting segment comprising a nucleotide sequence that is complementary to a first target nucleotide sequence in the single stranded target nucleic acid, and (b) a protein-binding segment comprising two stretches of nucleotides that hybridize with one another to form a double-stranded RNA duplex that interacts with the Cas9 polypeptide; and (iii) a PAMmer, wherein the PAMmer is a single stranded oligonucleotide comprising: (a) a protospacer adjacent motif (PAM) sequence, and (b) at least one of: (i) an orientation segment, positioned 3′ of the PAM sequence, comprising a nucleotide sequence that is complementary to a second target nucleotide sequence in the target nucleic acid; and (ii) a specificity segment, positioned 5′ of the PAM sequence, comprising a nucleotide sequence that is complementary to said first target nucleotide sequence. In some cases, the single stranded target nucleic acid is a single stranded RNA (ssRNA). In some cases, the target ssRNA is selected from: mRNA, rRNA, tRNA, non-coding RNA (ncRNA), long non-coding RNA (lncRNA), and microRNA (miRNA). In some cases, the target ssRNA is mRNA and the method results in reduced production of a protein encoded by the mRNA. In some cases, the single stranded target nucleic acid is single stranded DNA (ssDNA). In some cases, the single stranded target nucleic acid is from a virus. In some cases, the PAMmer is covalently linked to the guide nucleic acid. In some cases, the PAMmer is covalently linked to the Cas9 polypeptide. In some cases, the PAMmer comprises an orientation segment. In some cases, the PAMmer does not comprise a specificity segment. In some cases, the PAM sequence is the 5′ end of the PAMmer. In some cases, the PAMmer comprises a specificity segment. In some cases, the PAMmer does not comprise an orientation segment. In some cases, the PAM sequence is the 3′ end of the PAMmer. In some cases, the PAMmer comprises an orientation segment and a specificity segment. In some cases, the PAMmer comprises a detectable label (e.g., a fluorescent label). In some cases, the PAM sequence is GG. In some cases, the PAM sequence is 5′-NGG-3′ and N can be any nucleotide. In some cases, said contacting is outside of a cell in vitro. In some cases, said contacting is in a cell in vitro or ex vivo. In some cases, said contacting is in a cell in vivo. In some cases, the guide nucleic acid is a DNA/RNA hybrid nucleic acid and the first segment of the guide nucleic acid comprises DNA. In some cases, the guide nucleic acid is a guide RNA. In some cases, the guide nucleic acid is a dual guide nucleic acid, wherein the two stretches of nucleotides that hybridize with one another are present on separate nucleic acid molecules. In some cases, the guide nucleic acid is a single guide nucleic acid, wherein the two stretches of nucleotides that hybridize with one another are present on the same nucleic acid molecule and are covalently linked by intervening nucleotides. In some cases, the target nucleic acid: (i) does not have a nucleotide sequence that is complementary to the PAM sequence at a position within 10 nucleotides of the 3′ end of the specificity segment of the PAMmer; or (ii) does not have a nucleotide sequence that is complementary to the PAM sequence at a position within 10 nucleotides of the 5′ end of the orientation segment of the PAMmer. In some cases, 10 or less nucleotides are present in the target nucleic acid between the first and second target nucleotide sequences. In some cases, 2 or 3 nucleotides are present in the target nucleic acid between the first and second target nucleotide sequences.

[0020] The present disclosure features a method of binding a single stranded target nucleic acid, the method comprising: contacting the single stranded target nucleic acid with: (i) a variant Cas9 polypeptide having an amino acid mutation that results in reduced nuclease activity relative to a corresponding wild type Cas9 polypeptide; and (ii) a guide nucleic acid comprising: (a) a targeting segment comprising a nucleotide sequence that is complementary to a first target nucleotide sequence in the single stranded target nucleic acid, and (b) a protein-binding segment comprising two stretches of nucleotides that hybridize with one another to form a double-stranded RNA duplex that interacts with the Cas9 polypeptide, wherein said contacting produces a variant-Cas9/target complex. In some cases, the method further comprising contacting the single stranded target nucleic acid with a PAMmer, wherein the PAMmer is a single stranded oligonucleotide comprising: (a) a protospacer adjacent motif (PAM) sequence, and (b) at least one of: (i) an orientation segment, positioned 3′ of the PAM sequence, comprising a nucleotide sequence that is complementary to a second target nucleotide sequence in the target nucleic acid; and (ii) a specificity segment, positioned 5′ of the PAM sequence, comprising a nucleotide sequence that is complementary to said first target nucleotide sequence. In some cases, the PAMmer comprises a detectable label. In some cases, the PAMmer comprises an orientation segment and a specificity segment. In some cases, the variant Cas9 polypeptide comprises at least one of: (i) an H840A mutation of the S. pyogenes Cas9 amino acid sequence (SEQ ID NO:8) or the corresponding mutation in the amino acid sequence set forth in any of SEQ ID NOs: 1-7, 9-256, and 795-1346; and (ii) W476A and W1126A mutations of the S. pyogenes Cas9 amino acid sequence (SEQ ID NO:8) or the corresponding mutation in the amino acid sequence set forth in any of SEQ ID NOs: 1-7, 9-256, and 795-1346. In some cases, the variant Cas9 polypeptide comprises at least one of: (i) D10A and H840A mutations of the S. pyogenes Cas9 amino acid sequence (SEQ ID NO:8) or the corresponding mutations in the amino acid sequence set forth in any of SEQ ID NOs: 1-7, 9-256, and 795-1346; and (ii) W476A and W1126A mutations of the S. pyogenes Cas9 amino acid sequence (SEQ ID NO:8) or the corresponding mutation in the amino acid sequence set forth in any of SEQ ID NOs: 1-7, 9-256, and 795-1346. In some cases, the variant Cas9 polypeptide comprises a detectable label. In some cases, the detectable label of the Cas9 polypeptide is a fluorescent protein. In some cases, the guide nucleic acid comprises a detectable label. In some cases, the detectable label of the guide nucleic acid is a directly detectable label. In some cases, the detectable label of the guide nucleic acid is an indirectly detectable label. In some cases, the indirectly detectable label of the guide nucleic acid is a nucleotide sequence that specifically binds a labeling protein. In some cases, the variant Cas9 polypeptide comprises a fusion partner with an enzymatic activity, and the single stranded target nucleic acid is modified as a result of the method. In some cases, the method further comprises: isolating the variant-Cas9/target complex; releasing the single stranded target nucleic acid from the variant-Cas9/target complex; and collecting and/or analyzing the released single stranded target nucleic acid and/or a polypeptide associated with the single stranded target nucleic acid.

[0021] The present disclosure features a hybrid guide nucleic acid, comprising: (i) a targeting segment comprising a DNA nucleotide sequence that is complementary to a first target nucleotide sequence in a target nucleic acid (i.e., a targeting segment comprising deoxyribonucleotides having a nucleotide sequence that is complementary to a first target nucleotide sequence in a target nucleic acid); and (ii) a protein-binding segment that comprises RNA, forms a double-stranded RNA duplex, and interacts with a Cas9 polypeptide (i.e., a protein-binding segment comprising two stretches of ribonucleotides that hybridize with one another to form a double-stranded RNA duplex that interacts with a Cas9 polypeptide). In some cases, the protein-binding segment of the hybrid guide nucleic acid comprises a nucleotide sequence with 60% or more identity over a stretch of 8 or more contiguous nucleotides to a nucleotide sequence set forth in any of SEQ ID NOs: 431-682, or a complement thereof. In some cases, the hybrid guide nucleic acid is a dual guide nucleic acid (i.e., where two stretches of ribonucleotides that hybridize with one another are present on separate nucleic acid molecules). In some cases, the hybrid guide nucleic acid is a single guide nucleic acid (e.g., where two stretches of RNA nucleotides that hybridize with one another are present on the same nucleic acid molecule and are covalently linked by intervening nucleotides). In some cases, the guide nucleic acid is covalently linked to a PAMmer, wherein the PAMmer is a single stranded oligonucleotide comprising: a protospacer adjacent motif (PAM) sequence, and at least one of: (i) an orientation segment, positioned 3′ of the PAM sequence, comprising a nucleotide sequence that is complementary to a second target nucleotide sequence in the target nucleic acid; and (ii) a specificity segment, positioned 5′ of the PAM sequence, comprising a nucleotide sequence that is complementary to said first target nucleotide sequence.

[0022] Thus, the present disclosure features a hybrid guide nucleic acid, comprising: (i) an activator nucleic acid that comprises a duplex forming segment having an RNA nucleotide sequence; and (ii) a targeter nucleic acid that comprises (a) a targeting segment having a DNA nucleotide sequence that is complementary to a first target nucleotide sequence in a target nucleic acid, and (b) a duplex forming segment having an RNA nucleotide sequence, wherein the duplex forming segments of the activator and the targeter nucleic acids hybridize with one another to form a double-stranded RNA duplex that interacts with a Cas9 polypeptide. In some cases, the hybrid guide nucleic acid is a dual guide nucleic acid (i.e., where the activator and the targeter nucleic acids are separate nucleic acid molecules). In some cases, the hybrid guide nucleic acid is a single guide nucleic acid (e.g., where the activator and the targeter nucleic acids are covalently linked by intervening nucleotides).

[0023] The present disclosure features a PAM-modified Cas9 polypeptide, comprising a Cas9 polypeptide that is conjugated to a PAMmer, wherein the PAMmer is a single stranded oligonucleotide comprising: (a) a protospacer adjacent motif (PAM) sequence, and (b) at least one of: (i) an orientation segment, positioned 3′ of the PAM sequence, comprising a nucleotide sequence that is complementary to a second target nucleotide sequence in the target nucleic acid, and (ii) a specificity segment, positioned 5′ of the PAM sequence, comprising a nucleotide sequence that is complementary to said first target nucleotide sequence.

[0024] The present disclosure features a composition comprising: (i) a PAMmer, wherein the PAMmer is a single stranded oligonucleotide comprising: (a) a protospacer adjacent motif (PAM) sequence, and (b) at least one of: (b.i) an orientation segment, positioned 3′ of the PAM sequence, comprising a nucleotide sequence that is complementary to a first target nucleotide sequence in a target nucleic acid, and (b.ii) a specificity segment, positioned 5′ of the PAM sequence, comprising a nucleotide sequence that is complementary to a second target nucleotide sequence in a target nucleic acid; and at least one of: (ii) a Cas9 polypeptide, or a nucleic acid encoding the same; and (iii) a guide nucleic acid, or a nucleic acid encoding the same, wherein the guide nucleic acid comprises: (a) a targeting segment comprising a nucleotide sequence that is complementary to said first target nucleotide sequence in said single stranded target nucleic acid, and (b) a protein-binding segment comprising two stretches of nucleotides that hybridize with one another to form a double-stranded RNA duplex that interacts with a Cas9 polypeptide. In some cases, the guide nucleic acid is a guide RNA. In some cases, the guide nucleic acid is a DNA/RNA hybrid guide nucleic acid, wherein the targeting segment of the guide nucleic acid comprises DNA. In some cases, the guide nucleic acid is a dual guide nucleic acid, wherein the two stretches of nucleotides that hybridize with one another are present on separate nucleic acid molecules. In some cases, the guide nucleic acid is a single guide nucleic acid, wherein the two stretches of nucleotides that hybridize with one another are present on the same nucleic acid molecule and are covalently linked by intervening nucleotides. In some cases, the PAM sequence is the 5′ end of the PAMmer. In some cases, the PAM sequence is GG. In some cases, the PAM sequence is 5′-NGG-3′ and N can be any nucleotide. In some cases, 10 or less nucleotides are present in the target nucleic acid between the first and second target sequences. In some cases, 2 or 3 nucleotides are present in the target nucleic acid between the first and second target sequences. In some cases, the Cas9 polypeptide is a variant Cas9 polypeptide having reduced nuclease activity relative to a corresponding wild type Cas9 polypeptide.

[0025] The present disclosure features a kit comprising: (i) a guide nucleic acid, or a nucleic acid encoding the same, wherein the guide nucleic acid comprises: (a) a targeting segment comprising a nucleotide sequence that is complementary to a first target sequence in a target nucleic acid, and (b) a protein-binding segment comprising two stretches of nucleotides that hybridize with one another to form a double-stranded RNA duplex that interacts with a Cas9 polypeptide; and (ii) a PAMmer, or a nucleic acid encoding the same, wherein the PAMmer is a single stranded oligonucleotide comprising: (a) a protospacer adjacent motif (PAM) sequence, and (b) at least one of: (b.i) an orientation segment, positioned 3′ of the PAM sequence, comprising a nucleotide sequence that is complementary to a second target sequence in the target nucleic acid, and (b.ii) a specificity segment, positioned 5′ of the PAM sequence, comprising a nucleotide sequence that is complementary to said first target sequence.

[0026] The present disclosure features a library comprising: two or more targeting nucleic acid pairs, wherein each targeting pair comprises: (i) a guide nucleic acid, or a nucleic acid encoding the same, wherein the guide nucleic acid comprises: (a) a targeting segment comprising a nucleotide sequence that is complementary to a first target sequence in a target nucleic acid, and (b) a protein-binding segment comprising two stretches of nucleotides that hybridize with one another to form a double-stranded RNA duplex that interacts with a Cas9 polypeptide; and (ii) a PAMmer, or a nucleic acid encoding the same, wherein the PAMmer is a single stranded oligonucleotide comprising: (a) a protospacer adjacent motif (PAM) sequence, and (b) at least one of: (b.i) an orientation segment, positioned 3′ of the PAM sequence, comprising a nucleotide sequence that is complementary to a second target sequence in the target nucleic acid, and (b.ii) a specificity segment, positioned 5′ of the PAM sequence, comprising a nucleotide sequence that is complementary to said first target sequence in the target nucleic acid.

### BRIEF DESCRIPTION OF THE DRAWINGS

[0027] FIG. 1 presents binding assays testing whether Cas9 binds single stranded target nucleic acid molecules (e.g., single stranded RNA (sRNA)) in the presence of a protospacer adjacent motif (PAM)-containing oligonucleotide (“PAMmer”).

[0028] FIGS. 2A-B present binding assays testing whether single stranded target nucleic acid binding is stabilized by PAMmers of increasing length, and whether the PAM sequence itself within the PAMmer needs to be base-paired to the single stranded target nucleic acid.

[0029] FIG. 3 presents cleavage assays testing whether Cas9 can cleave a single stranded RNA (sRNA) target nucleic acid when used in combination with a PAMmer.

[0030] FIGS. 4A-B presents cleavage assays testing whether a DNA oligonucleotide complementary to a single stranded target nucleic acid (e.g., sRNA), but lacking the PAM, can activate Cas9 for cleavage; and whether a PAMmer having a specificity segment can facilitate Cas9 cleavage.

[0031] FIGS. 5A-C present binding and cleavage assays testing off-target effects and employing various PAMmers. λ2 (SEQ ID NO:1361); λ3 (SEQ ID NO:1362); λ4 (SEQ ID NO:1363).

[0032] FIG. 6 presents cleavage assays employing various PAMmers.

[0033] FIGS. 7A-D present assays testing whether Cas9 can cleave and/or bind a single stranded DNA (ssDNA) target nucleic acid when used in combination with a PAMmer.

[0034] FIGS. 8A-F provide a schematic drawing of exemplary embodiments of subject compositions and methods. (A-B) Each embodiment depicted includes a PAMmer, which is hybridized to a single stranded target nucleic acid; and a guide nucleic acid, which is hybrized to the target nucleic acid and is associated with a Cas9 polypeptide. (C-D) Each embodiment depicted includes a PAMmer having a specificity segment and an orientation segment. The PAM sequence is complementary to the target nucleic acid in 8C, and is not complementary to the target nucleic acid in 8D.

[0035] FIGS. 9A-B depict the amino acid sequence of a Cas9 polypeptide from Streptococcus pyogenes (SEQ ID NO:8). Cas9 has domains homologous to both HNH and RuvC endonucleases. (A) Motifs 1-4 are overlined. (B) Domains 1 and 2 are overlined.

[0036] FIG. 10 depicts a multiple sequence alignment of motifs 1-4 of Cas9 proteins from various diverse species. (Streptococcus pyogenes (SEQ ID NO:8), Legionella pneumophila (SEQ ID NO:17), Gamma proteobacterium (SEQ ID NO:107), Listeria innocua (SEQ ID NO:3), Lactobacillus gasseri (SEQ ID NO:152), Eubacterium rectale (SEQ ID NO:99), Staphylococcus lugdunensis (SEQ ID NO:185), Mycoplasma synoviae (SEQ ID NO:22), Mycoplasma mobile (SEQ ID NO:16), Wolinella succinogenes (SEQ ID NO:10), Flavobacterium columnare (SEQ ID NO:235), Fibrobacter succinogenes (SEQ ID NO:121), Bacteroides fragilis (SEQ ID NO:21), Acidothermus cellulolyticus (SEQ ID NO:42), and Bifidobacterium dentium (SEQ ID NO:131).

[0037] FIGS. 11A-B provide alignments of naturally occurring tracrRNA (“activator”) sequences from various species (L. innocua (SEQ ID NO:268); S. pyogenes (SEQ ID NO:267); S. mutans (SEQ ID NO:269); S. thermophilus1 (SEQ ID NO:270); M. mobile (SEQ ID NO:274); N. meningitides (SEQ ID NO:272); P. multocida (SEQ ID NO:273); S. thermophilus2 (SEQ ID NO:271); and S. pyogenes (SEQ ID NO:267). (A) multiple sequence alignment of selected tracrRNA orthologues (AlignX, VectorNT1 package, Invitrogen) associated with CRISPR/Cas loci of similar architecture and highly similar Cas9 sequences. Black boxes represent shared nucleotides (B) multiple sequence alignment of selected tracrRNA orthologues (AlignX, VectorNT1 package, Invitrogen) associated with CRISPR/Cas loci of different architecture and non-closely related Cas9 sequences. Note the sequence similarity of N. meningitidis and P. multocida tracrRNA orthologues. Black boxes represent shared nucleotides. For more exemplary activator sequences, see SEQ ID NOs:431-562.

[0038] FIGS. 12A-B provide alignments of naturally occurring duplex-forming segments of crRNA (“targeter”) sequences from various species (L. innocua (SEQ ID NO:577); S. pyogenes (SEQ ID NO:569); S. mutans (SEQ ID NO:574); S. thermophilus1 (SEQ ID NO:575); C. jejuni (SEQ ID NO:597); S. pyogenes (SEQ ID NO:569); F. novicida (SEQ ID NO:572); M. mobile (SEQ ID NO:571); N. meningitides (SEQ ID NO:579); P. multocida (SEQ ID NO:570); and S. thermophilus2 (SEQ ID NO:576). (A) multiple sequence alignments of exemplary duplex-forming segment of targeter sequences (AlignX, VectorNT1 package, Invitrogen) associated with the loci of similar architecture and highly similar Cas9 sequences. (B) multiple sequence alignments of exemplary duplex-forming segment of targeter sequences (AlignX, VectorNTI package, Invitrogen) associated with the loci of different architecture and diverse Cas9 sequences. Black boxes represent shared nucleotides. For more exemplary duplex-forming segments targeter sequences, see SEQ ID NOs:563-679.

[0039] FIG. 13 provides a schematic of hybridization for naturally occurring duplex-forming segments of the crRNA (“targeter”) with the duplex-forming segment of the corresponding tracrRNA orthologue (“activator”). Upper sequence, targeter; lower sequence, duplex-forming segment of the corresponding activator. The CRISPR loci belong to the Type II (Nmeni/CASS4) CRISPR/Cas system. Nomenclature is according to the CRISPR database (CRISPR DB). SEQ ID numbers are listed top to bottom: S. pyogenes (SEQ ID NOs:569 and 442); S. mutans (SEQ ID NOs:574 and 443); S. thermophilus1 (SEQ ID NOs:575 and 444); S. thermophilus2 (SEQ ID NOs:576 and 445); L. innocua (SEQ ID NOs:577 and 446); T. denticola (SEQ ID NOs:578 and 448); N. meningitides (SEQ ID NOs:579 and 449); S. gordonii (SEQ ID NOs:580 and 451); B. bifidum (SEQ ID NOs:581 and 452); L. salivarius (SEQ ID NOs:582 and 453); F. tularensis (SEQ ID NOs:583, 454, 584, and 455); and L. pneumophila (SEQ ID NOs:585 and 456). Note that some species contain more than one Type II CRISPR loci. For more exemplary activator sequences, see SEQ ID NOs:431-562. For more exemplary duplex-forming segments of targeter sequences, see SEQ ID NOs:563-679.

[0040] FIG. 14 depicts example tracrRNA (activator) and crRNA (targeter) sequences from two species. A degree of interchangeability exists; for example, the S. pyogenes Cas9 protein is functional with tracrRNA and crRNA derived from L. innocua. “I” denotes a canonical Watson-Crick base pair while “•” denotes a G-U wobble base pair. “Variable 20 nt” or “20 nt” represents the targeting segment that is complementary to a target nucleic acid (this region can be up to about 100 nt in length). Also shown is the design of a single guide nucleic acid that incorporates features of the targeter and the activator. Cas9 protein sequences from a wide variety of species are set forth as SEQ ID NOs:1-256 and 795-1346. Streptococcus pyogenes (top to bottom, SEQ ID NOs: 563, 478, 680); Listeria innocua (top to bottom, SEQ ID NOs: 564, 479, 681). The sequences provided are non-limiting examples and are meant to illustrate how single and dual guide nucleic acids can be designed based on targeter and activator sequences from a wide variety of species. Various examples of suitable sequences from a wide variety of species are set forth as follows (Cas9 protein: SEQ ID NOs:1-259; tracrRNAs: SEQ ID NOs:431-562, or the complements thereof; crRNAs: SEQ ID NOs:563-679, or the complements thereof; and exemplary single guide nucleic acids designed from targeter and activator sequences: SEQ ID NOs:680-682).

[0041] FIGS. 15 A-D list examples of suitable fusion partners (or fragments thereof) for a subject Cas9 polypeptide (e.g., wild type Cas9, variant Cas9). Examples include, but are not limited to those listed.

[0042] FIGS. 16 A-D provide experiments directed at determining Cas9 amino acid positions required for cleavage as well as alignments of selected regions of Cas9 polypeptides. (C) Top to bottom (SEQ ID NOs:1364-1375). (D) Top to bottom (SEQ ID NOs:1376-1391).

[0043] FIGS. 17 A-B provide experiments testing PAMmer the include one or more modified nucleotides.

[0044] FIGS. 18 A-E provides evidence demonstrateing RNA-guided Cas9 cleaving ssRNA targets in the presence of a short PAM presenting DNA oligonucleotide (PAMmer). “PAMmer” (SEQ ID NO: 1471); “Target ssRNA” (SEQ ID NO: 1472).

[0045] FIGS. 19 A-C present assays testing whether dCas9-gRNA binds ssRNA targets with high affinity in the presence of PAMmers.

[0046] FIGS. 20 A-D present assays testing whether 5′-extended PAMmers are required for specific target ssRNA binding.

[0047] FIGS. 21 A-H present assays testing whether RNA-guided Cas9 can target non-PAM sites on ssRNA and can be used to isolate GAPDH mRNA from HeLa cells in a tagless manner. (H) (Top to bottom, SEQ ID NOs: 1473-1478).

[0048] FIG. 22 depicts quantified data for cleavage of ssRNA by Cas9-gRNA in the presence of a 19-nucleotide PAMmer.

[0049] FIG. 23 provides data showing that RNA cleavage is marginally stimulated by di- and tri-deoxyribonucleotides.

[0050] FIG. 24 provides a representative binding experiment demonstrating guide-specific ssRNA binding with 5′-extended PAMmers.

[0051] FIGS. 25 A-B provide data exploring RNA cleavage efficiencies and binding specificity using PAMmers with variable 5′-extensions.

[0052] FIGS. 26 A-E provide date related to site-specific biotin labelling of Cas9.

[0053] FIG. 27 provides data showing that RNA-guided Cas9 can utilize chemically modified PAMmers.

[0054] FIGS. 28 A-B provide data showing that Cas9 programmed with GAPDH-specific gRNAs can pull down GAPDH mRNA in the absence of PAMmers.

[0055] FIGS. 29 A-F provide schematics of applications of RCas9 (RNA directed Cas9) for untagged transcript analysis, detection and manipulation.

### DEFINITIONS

[0056] The terms “polynucleotide” and “nucleic acid,” used interchangeably herein, refer to a polymeric form of nucleotides of any length, either ribonucleotides or deoxyribonucleotides. Thus, this term includes, but is not limited to, single-, double-, or multi-stranded DNA or RNA, genomic DNA, cDNA, DNA-RNA hybrids, or a polymer comprising purine and pyrimidine bases or other natural, chemically or biochemically modified, non-natural, or derivatized nucleotide bases.

[0057] The term “oligonucleotide” refers to a polynucleotide of between 3 and 100 nucleotides of single- or double-stranded nucleic acid (e.g., DNA, RNA, or a modified nucleic acid). However, for the purposes of this disclosure, there is no upper limit to the length of an oligonucleotide. Oligonucleotides are also known as “oligomers” or “oligos” and may be isolated from genes, transcribed (in vitro and/or in vivo), or chemically synthesized. The terms “polynucleotide” and “nucleic acid” should be understood to include, as applicable to the embodiments being described, single-stranded (such as sense or antisense) and double-stranded polynucleotides.

[0058] A “stem-loop structure” refers to a nucleic acid having a secondary structure that includes a region of nucleotides which are known or predicted to form a double strand (step portion) that is linked on one side by a region of predominantly single-stranded nucleotides (loop portion). The terms “hairpin” and “fold-back” structures are also used herein to refer to stem-loop structures. Such structures are well known in the art and these terms are used consistently with their known meanings in the art. As is known in the art, a stem-loop structure does not require exact base-pairing. Thus, the stem may include one or more base mismatches. Alternatively, the base-pairing may be exact, i.e. not include any mismatches.

[0059] By “hybridizable” or “complementary” or “substantially complementary” it is meant that a nucleic acid (e.g. RNA, DNA) comprises a sequence of nucleotides that enables it to non-covalently bind, i.e. form Watson-Crick base pairs and/or G/U base pairs, “anneal”, or “hybridize,” to another nucleic acid in a sequence-specific, antiparallel, manner (i.e., a nucleic acid specifically binds to a complementary nucleic acid) under the appropriate in vitro and/or in vivo conditions of temperature and solution ionic strength. Standard Watson-Crick base-pairing includes: adenine (A) pairing with thymidine (T), adenine (A) pairing with uracil (U), and guanine (G) pairing with cytosine (C) [DNA, RNA]. In addition, for hybridization between two RNA molecules (e.g., dsRNA), and for hybridization of a DNA molecule with an RNA molecule (e.g., when a ssRNA target nucleic acid base pairs with a DNA PAMmer, when a DNA target nucleic acid base pairs with an RNA guide nucleic acid, etc.): guanine (G) can also base pair with uracil (U). For example, G/U base-pairing is partially responsible for the degeneracy (i.e., redundancy) of the genetic code in the context of tRNA anti-codon base-pairing with codons in mRNA. Thus, in the context of this disclosure, a guanine (G) (e.g., of a protein-binding segment (dsRNA duplex) of a subject guide nucleic acid molecule; of a target nucleic acid base pairing with a guide nucleic acid and/or a PAMmer, etc.) is considered complementary to both a uracil (U) and to an adenine (A). For example, when a G/U base-pair can be made at a given nucleotide position of a protein-binding segment (e.g., dsRNA duplex) of a subject guide nucleic acid molecule, the position is not considered to be non-complementary, but is instead considered to be complementary.

[0060] Hybridization and washing conditions are well known and exemplified in Sambrook, J., Fritsch, E. F. and Maniatis, T. Molecular Cloning: A Laboratory Manual, Second Edition, Cold Spring Harbor Laboratory Press, Cold Spring Harbor (1989), particularly Chapter 11 and Table 11.1 therein; and Sambrook, J. and Russell, W., Molecular Cloning: A Laboratory Manual, Third Edition, Cold Spring Harbor Laboratory Press, Cold Spring Harbor (2001). The conditions of temperature and ionic strength determine the “stringency” of the hybridization.

[0061] Hybridization requires that the two nucleic acids contain complementary sequences, although mismatches between bases are possible. The conditions appropriate for hybridization between two nucleic acids depend on the length of the nucleic acids and the degree of complementarity, variables well known in the art. The greater the degree of complementarity between two nucleotide sequences, the greater the value of the melting temperature (Tm) for hybrids of nucleic acids having those sequences. For hybridizations between nucleic acids with short stretches of complementarity (e.g. complementarity over 35 or less, 30 or less, 25 or less, 22 or less, 20 or less, or 18 or less nucleotides) the position of mismatches can become important (see Sambrook et al., supra, 11.7-11.8). Typically, the length for a hybridizable nucleic acid is 8 nucleotides or more (e.g., 10 nucleotides or more, 12 nucleotides or more, 15 nucleotides or more, 20 nucleotides or more, 22 nucleotides or more, 25 nucleotides or more, or 30 nucleotides or more). The temperature and wash solution salt concentration may be adjusted as necessary according to factors such as length of the region of complementation and the degree of complementation.

[0062] It is understood that the sequence of a polynucleotide need not be 100% complementary to that of its target nucleic acid to be specifically hybridizable or hybridizable. Moreover, a polynucleotide may hybridize over one or more segments such that intervening or adjacent segments are not involved in the hybridization event (e.g., a loop structure or hairpin structure). A polynucleotide can comprise 60% or more, 65% or more, 70% or more, 75% or more, 80% or more, 85% or more, 90% or more, 95% or more, 98% or more, 99% or more, 99.5% or more, or 100% sequence complementarity to a target region within the target nucleic acid sequence to which it will hybridize. For example, an antisense nucleic acid in which 18 of 20 nucleotides of the antisense compound are complementary to a target region, and would therefore specifically hybridize, would represent 90 percent complementarity. In this example, the remaining noncomplementary nucleotides may be clustered or interspersed with complementary nucleotides and need not be contiguous to each other or to complementary nucleotides. Percent complementarity between particular stretches of nucleic acid sequences within nucleic acids can be determined using any convenient method. Exemplary methods include BLAST programs (basic local alignment search tools) and PowerBLAST programs (Altschul et al., J. Mol. Biol., 1990, 215, 403-410; Zhang and Madden, Genome Res., 1997, 7, 649-656) or by using the Gap program (Wisconsin Sequence Analysis Package, Version 8 for Unix, Genetics Computer Group, University Research Park, Madison Wis.), using default settings, which uses the algorithm of Smith and Waterman (Adv. Appl. Math., 1981, 2, 482-489).

[0063] The terms “peptide,” “polypeptide,” and “protein” are used interchangeably herein, and refer to a polymeric form of amino acids of any length, which can include coded and non-coded amino acids, chemically or biochemically modified or derivatized amino acids, and polypeptides having modified peptide backbones.

[0064] “Binding” as used herein (e.g. with reference to an RNA-binding domain of a polypeptide, binding to a target nucleic acid, and the like) refers to a non-covalent interaction between macromolecules (e.g., between a protein and a nucleic acid; between a subject Cas9/guide nucleic acid complex and a target nucleic acid; and the like). While in a state of non-covalent interaction, the macromolecules are said to be “associated” or “interacting” or “binding” (e.g., when a molecule X is said to interact with a molecule Y, it is meant the molecule X binds to molecule Y in a non-covalent manner). Not all components of a binding interaction need be sequence-specific (e.g., contacts with phosphate residues in a DNA backbone), but some portions of a binding interaction may be sequence-specific. Binding interactions are generally characterized by a dissociation constant (K_{d}) of less than 10⁻⁶ M, less than 10⁻⁷ M, less than 10⁻⁸ M, less than 10⁻⁹ M, less than 10⁻¹° M, less than 10⁻¹¹ M, less than 10⁻¹² M, less than 10⁻¹³ M, less than 10⁻¹⁴ M, or less than 10⁻¹⁵ M. “Affinity” refers to the strength of binding, increased binding affinity being correlated with a lower K_{d}.

[0065] By “binding domain” it is meant a protein domain that is able to bind non-covalently to another molecule. A binding domain can bind to, for example, a DNA molecule (a DNA-binding domain), an RNA molecule (an RNA-binding domain) and/or a protein molecule (a protein-binding domain). In the case of a protein having a protein-binding domain, it can in some cases bind to itself (to form homodimers, homotrimers, etc.) and/or it can bind to one or more regions of a different protein or proteins.

[0066] The term “conservative amino acid substitution” refers to the interchangeability in proteins of amino acid residues having similar side chains. For example, a group of amino acids having aliphatic side chains consists of glycine, alanine, valine, leucine, and isoleucine; a group of amino acids having aliphatic-hydroxyl side chains consists of serine and threonine; a group of amino acids having amide containing side chains consisting of asparagine and glutamine; a group of amino acids having aromatic side chains consists of phenylalanine, tyrosine, and tryptophan; a group of amino acids having basic side chains consists of lysine, arginine, and histidine; a group of amino acids having acidic side chains consists of glutamate and aspartate; and a group of amino acids having sulfur containing side chains consists of cysteine and methionine. Exemplary conservative amino acid substitution groups are valine-leucine-isoleucine, phenylalanine-tyrosine, lysine-arginine, alanine-valine-glycine, and asparagine-glutamine.

[0067] A polynucleotide or polypeptide has a certain percent “sequence identity” to another polynucleotide or polypeptide, meaning that, when aligned, that percentage of bases or amino acids are the same, and in the same relative position, when comparing the two sequences. Sequence identity can be determined in a number of different ways. To determine sequence identity, sequences can be aligned using various methods and computer programs (e.g., BLAST, T-COFFEE, MUSCLE, MAFFT, etc.), available over the world wide web at sites including ncbi.nlm.nili gov/BLAST, ebi.ac.uldTools/msa/tcoffee/, ebi.ac.uk/Tools/msa/muscle/, mafft.cbrc.jp/alignment/software/. See, e.g., Altschul et al. (1990), J. Mol. Bioi. 215:403-10.

[0068] A DNA sequence that “encodes” a particular RNA is a DNA nucleic acid sequence that is transcribed into RNA. A DNA polynucleotide may encode an RNA (mRNA) that is translated into protein, or a DNA polynucleotide may encode an RNA that is not translated into protein (e.g. tRNA, rRNA, microRNA (miRNA), a “non-coding” RNA (ncRNA), a guide nucleic acid, etc.).

[0069] A “protein coding sequence” or a sequence that encodes a particular protein or polypeptide, is a nucleic acid sequence that is transcribed into mRNA (in the case of DNA) and is translated (in the case of mRNA) into a polypeptide in vitro or in vivo when placed under the control of appropriate regulatory sequences. The boundaries of the coding sequence are determined by a start codon at the 5′ terminus (N-terminus) and a translation stop nonsense codon at the 3′ terminus (C-terminus). A coding sequence can include, but is not limited to, cDNA from prokaryotic or eukaryotic mRNA, genomic DNA sequences from prokaryotic or eukaryotic DNA, and synthetic nucleic acids. A transcription termination sequence will usually be located 3′ to the coding sequence.

[0070] The terms “DNA regulatory sequences,” “control elements,” and “regulatory elements,” used interchangeably herein, refer to transcriptional and translational control sequences, such as promoters, enhancers, polyadenylation signals, terminators, protein degradation signals, and the like, that provide for and/or regulate transcription of a non-coding sequence (e.g., guide nucleic acid) or a coding sequence (e.g., Cas9 polypeptide, or Cas9 polypeptide) and/or regulate translation of an encoded polypeptide.

[0071] As used herein, a “promoter sequence” is a DNA regulatory region capable of binding RNA polymerase and initiating transcription of a downstream (3′ direction) coding or non-coding sequence. For purposes of the present disclosure, the promoter sequence is bounded at its 3′ terminus by the transcription initiation site and extends upstream (5′ direction) to include the minimum number of bases or elements necessary to initiate transcription at levels detectable above background. Within the promoter sequence will be found a transcription initiation site, as well as protein binding domains responsible for the binding of RNA polymerase. Eukaryotic promoters will often, but not always, contain “TATA” boxes and “CAT” boxes. Various promoters, including inducible promoters, may be used to drive the various vectors of the present disclosure.

[0072] The term “naturally-occurring” or “unmodified” or “wild type” as used herein as applied to a nucleic acid, a polypeptide, a cell, or an organism, refers to a nucleic acid, polypeptide, cell, or organism that is found in nature. For example, a polypeptide or polynucleotide sequence that is present in an organism (including viruses) that can be isolated from a source in nature and which has not been intentionally modified by a human in the laboratory is wild type (and naturally occurring).

[0073] The term “chimeric” as used herein as applied to a nucleic acid or polypeptide refers to two components that are defined by structures derived from different sources. For example, where “chimeric” is used in the context of a chimeric polypeptide (e.g., a chimeric Cas9 protein), the chimeric polypeptide includes amino acid sequences that are derived from different polypeptides. A chimeric polypeptide may comprise either modified or naturally-occurring polypeptide sequences (e.g., a first amino acid sequence from a modified or unmodified Cas9 protein; and a second amino acid sequence other than the Cas9 protein). Similarly, “chimeric” in the context of a polynucleotide encoding a chimeric polypeptide includes nucleotide sequences derived from different coding regions (e.g., a first nucleotide sequence encoding a modified or unmodified Cas9 protein; and a second nucleotide sequence encoding a polypeptide other than a Cas9 protein).

[0074] The term “chimeric polypeptide” refers to a polypeptide which is made by the combination (i.e., “fusion”) of two otherwise separated segments of amino sequence, usually through human intervention. A polypeptide that comprises a chimeric amino acid sequence is a chimeric polypeptide. Some chimeric polypeptides can be referred to as “fusion variants.”

[0075] “Heterologous,” as used herein, means a nucleotide or polypeptide sequence that is not found in the native nucleic acid or protein, respectively. For example, in a chimeric Cas9 protein, the RNA-binding domain of a naturally-occurring bacterial Cas9 polypeptide (or a variant thereof) may be fused to a heterologous polypeptide sequence (i.e. a polypeptide sequence from a protein other than Cas9 or a polypeptide sequence from another organism). The heterologous polypeptide sequence may exhibit an activity (e.g., enzymatic activity) that will also be exhibited by the chimeric Cas9 protein (e.g., methyltransferase activity, acetyltransferase activity, kinase activity, ubiquitinating activity, etc.). A heterologous nucleic acid sequence may be linked to a naturally-occurring nucleic acid sequence (or a variant thereof) (e.g., by genetic engineering) to generate a chimeric nucleotide sequence encoding a chimeric polypeptide. As another example, in a fusion variant Cas9 polypeptide, a variant Cas9 polypeptide may be fused to a heterologous polypeptide (i.e. a polypeptide other than Cas9), which exhibits an activity that will also be exhibited by the fusion variant Cas9 polypeptide. A heterologous nucleic acid sequence may be linked to a variant Cas9 polypeptide (e.g., by genetic engineering) to generate a nucleotide sequence encoding a fusion variant polypeptide.

[0076] “Recombinant,” as used herein, means that a particular nucleic acid (DNA or RNA) is the product of various combinations of cloning, restriction, polymerase chain reaction (PCR) and/or ligation steps resulting in a construct having a structural coding or non-coding sequence distinguishable from endogenous nucleic acids found in natural systems. DNA sequences encoding polypeptides can be assembled from cDNA fragments or from a series of synthetic oligonucleotides, to provide a synthetic nucleic acid which is capable of being expressed from a recombinant transcriptional unit contained in a cell or in a cell-free transcription and translation system. Genomic DNA comprising the relevant sequences can also be used in the formation of a recombinant gene or transcriptional unit. Sequences of non-translated DNA may be present 5′ or 3′ from the open reading frame, where such sequences do not interfere with manipulation or expression of the coding regions, and may indeed act to modulate production of a desired product by various mechanisms (see “DNA regulatory sequences”, below). Alternatively, DNA sequences encoding RNA (e.g., guide nucleic acid) that is not translated may also be considered recombinant. Thus, e.g., the term “recombinant” nucleic acid refers to one which is not naturally occurring, e.g., is made by the artificial combination of two otherwise separated segments of sequence through human intervention. This artificial combination is often accomplished by either chemical synthesis means, or by the artificial manipulation of isolated segments of nucleic acids, e.g., by genetic engineering techniques. Such is usually done to replace a codon with a codon encoding the same amino acid, a conservative amino acid, or a non-conservative amino acid. Alternatively, it is performed to join together nucleic acid segments of desired functions to generate a desired combination of functions. This artificial combination is often accomplished by either chemical synthesis means, or by the artificial manipulation of isolated segments of nucleic acids, e.g., by genetic engineering techniques. When a recombinant polynucleotide encodes a polypeptide, the sequence of the encoded polypeptide can be naturally occurring (“wild type”) or can be a variant (e.g., a mutant) of the naturally occurring sequence. Thus, the term “recombinant” polypeptide does not necessarily refer to a polypeptide whose sequence does not naturally occur. Instead, a “recombinant” polypeptide is encoded by a recombinant DNA sequence, but the sequence of the polypeptide can be naturally occurring (“wild type”) or non-naturally occurring (e.g., a variant, a mutant, etc.). Thus, a “recombinant” polypeptide is the result of human intervention, but may be a naturally occurring amino acid sequence.

[0077] A “vector” or “expression vector” is a replicon, such as plasmid, phage, virus, or cosmid, to which another DNA segment, i.e. an “insert”, may be attached so as to bring about the replication of the attached segment in a cell.

[0078] An “expression cassette” comprises a DNA coding sequence operably linked to a promoter. “Operably linked” refers to a juxtaposition wherein the components so described are in a relationship permitting them to function in their intended manner. For instance, a promoter is operably linked to a coding sequence if the promoter affects its transcription or expression.

[0079] The terms “recombinant expression vector,” or “DNA construct” are used interchangeably herein to refer to a DNA molecule comprising a vector and one insert. Recombinant expression vectors are usually generated for the purpose of expressing and/or propagating the insert(s), or for the construction of other recombinant nucleotide sequences. The insert(s) may or may not be operably linked to a promoter sequence and may or may not be operably linked to DNA regulatory sequences.

[0080] A cell has been “genetically modified” or “transformed” or “transfected” by exogenous DNA, e.g. a recombinant expression vector, when such DNA has been introduced inside the cell. The presence of the exogenous DNA results in permanent or transient genetic change. The transforming DNA may or may not be integrated (covalently linked) into the genome of the cell. In prokaryotes, yeast, and mammalian cells for example, the transforming DNA may be maintained on an episomal element such as a plasmid. With respect to eukaryotic cells, a stably transformed cell is one in which the transforming DNA has become integrated into a chromosome so that it is inherited by daughter cells through chromosome replication. This stability is demonstrated by the ability of the eukaryotic cell to establish cell lines or clones that comprise a population of daughter cells containing the transforming DNA. A “clone” is a population of cells derived from a single cell or common ancestor by mitosis. A “cell line” is a clone of a primary cell that is capable of stable growth in vitro for many generations.

[0081] Suitable methods of genetic modification (also referred to as “transformation”) include e.g., viral or bacteriophage infection, transfection, conjugation, protoplast fusion, lipofection, electroporation, calcium phosphate precipitation, polyethyleneimine (PEI)-mediated transfection, DEAE-dextran mediated transfection, liposome-mediated transfection, particle gun technology, calcium phosphate precipitation, direct micro injection, nanoparticle-mediated nucleic acid delivery (see, e.g., Panyam et., al Adv Drug Deliv Rev. 2012 Sep. 13. pii: S0169-409X(12)00283-9. doi: 10.1016/j.addr.2012.09.023), and the like.

[0082] The choice of method of genetic modification is generally dependent on the type of cell being transformed and the circumstances under which the transformation is taking place (e.g., in vitro, ex vivo, or in vivo). A general discussion of these methods can be found in Ausubel, et al., Short Protocols in Molecular Biology, 3rd ed., Wiley & Sons, 1995.

[0083] A “target nucleic acid” as used herein is a polynucleotide (e.g., RNA, DNA) that includes a “target site” or “target sequence.” The terms “target site” or “target sequence” are used interchangeably herein to refer to a nucleic acid sequence present in a target nucleic acid to which a targeting segment of a subject guide nucleic acid will bind (see FIG. 8), provided sufficient conditions for binding exist. For example, the target site (or target sequence) 5′-GAGCAUAUC-3′ within a target nucleic acid is targeted by (or is bound by, or hybridizes with, or is complementary to) the sequence 5′-GAUAUGCUC-3′. Suitable hybridization conditions include physiological conditions normally present in a cell. For a double stranded target nucleic acid, the strand of the target nucleic acid that is complementary to and hybridizes with the guide nucleic acid is referred to as the “complementary strand”; while the strand of the target nucleic acid that is complementary to the “complementary strand” (and is therefore not complementary to the guide nucleic acid) is referred to as the “noncomplementary strand” or “non-complementary strand”. In cases where the target nucleic acid is a single stranded target nucleic acid (e.g., single stranded DNA (ssDNA), single stranded RNA (sRNA)), the guide nucleic acid is complementary to and hybridizes with single stranded target nucleic acid.

[0084] By “Cas9 polypeptide” or “site-directed polypeptide” or “site-directed Cas9 polypeptide” it is meant a polypeptide that binds RNA (e.g., the protein binding segment of a guide nucleic acid) and is targeted to a specific sequence (a target site) in a target nucleic acid. A Cas9 polypeptide as described herein is targeted to a target site by the guide nucleic acid to which it is bound. The guide nucleic acid comprises a sequence that is complementary to a target sequence within the target nucleic acid, thus targeting the bound Cas9 polypeptide to a specific location within the target nucleic acid (the target sequence) (e.g., stabilizing the interaction of Cas9 with the target nucleic acid). In some cases, the Cas9 polypeptide is a naturally-occurring polypeptide (e.g, naturally occurs in bacterial and/or archaeal cells). In other cases, the Cas9 polypeptide is not a naturally-occurring polypeptide (e.g., the Cas9 polypeptide is a variant Cas9 polypeptide, a chimeric polypeptide as discussed below, and the like). Exemplary Cas9 polypeptides are set forth in SEQ ID NOs: 1-259, and 795-1346 as a non-limiting and non-exhaustive list. Naturally occurring Cas9 polypeptides bind a guide nucleic acid, are thereby directed to a specific sequence within a target nucleic acid (a target site), and cleave the target nucleic acid (e.g., cleave dsDNA to generate a double strand break, cleave ssDNA, cleave ssRNA, etc.). A subject Cas9 polypeptide comprises two portions, an RNA-binding portion and an activity portion. An RNA-binding portion interacts with a subject guide nucleic acid. An activity portion exhibits site-directed enzymatic activity (e.g., nuclease activity, activity for DNA and/or RNA methylation, activity for DNA and/or RNA cleavage, activity for histone acetylation, activity for histone methylation, activity for RNA modification, activity for RNA-binding, activity for RNA splicing etc.). In some cases the activity portion exhibits reduced nuclease activity relative to the corresponding portion of a wild type Cas9 polypeptide. In some cases, the activity portion is enzymatically inactive.

[0085] By “cleavage” it is meant the breakage of the covalent backbone of a target nucleic acid molecule (e.g., RNA, DNA). Cleavage can be initiated by a variety of methods including, but not limited to, enzymatic or chemical hydrolysis of a phosphodiester bond. Both single-stranded cleavage and double-stranded cleavage are possible, and double-stranded cleavage can occur as a result of two distinct single-stranded cleavage events. In certain embodiments, a complex comprising a guide nucleic acid and a Cas9 polypeptide is used for targeted cleavage of a single stranded target nucleic acid (e.g., ssRNA, ssDNA).

[0086] “Nuclease” and “endonuclease” are used interchangeably herein to mean an enzyme which possesses catalytic activity for nucleic acid cleavage (e.g., ribonuclease activity (ribonucleic acid cleavage), deoxyribonuclease activity (deoxyribonucleic acid cleavage), etc.).

[0087] By “cleavage domain” or “active domain” or “nuclease domain” of a nuclease it is meant the polypeptide sequence or domain within the nuclease which possesses the catalytic activity for nucleic acid cleavage. A cleavage domain can be contained in a single polypeptide chain or cleavage activity can result from the association of two (or more) polypeptides. A single nuclease domain may consist of more than one isolated stretch of amino acids within a given polypeptide.

[0088] A nucleic acid molecule that binds to the Cas9 polypeptide and targets the polypeptide to a specific location within the target nucleic acid is referred to herein as a “guide nucleic acid”. When the guide nucleic acid is an RNA molecule, it can be referred to as a “guide RNA” or a “gRNA”. A subject guide nucleic acid comprises two segments, a first segment (referred to herein as a “targeting segment”); and a second segment (referred to herein as a “protein-binding segment”). By “segment” it is meant a segment/section/region of a molecule, e.g., a contiguous stretch of nucleotides in a nucleic acid molecule. A segment can also mean a region/section of a complex such that a segment may comprise regions of more than one molecule. For example, in some cases the protein-binding segment (described below) of a guide nucleic acid is one nucleic acid molecule (e.g., one RNA molecule) and the protein-binding segment therefore comprises a region of that one molecule. In other cases, the protein-binding segment (described below) of a guide nucleic acid comprises two separate molecules that are hybridized along a region of complementarity. As an illustrative, non-limiting example, a protein-binding segment of a guide nucleic acid that comprises two separate molecules can comprise (i) base pairs 40-75 of a first molecule (e.g., RNA molecule, DNA/RNA hybrid molecule) that is 100 base pairs in length; and (ii) base pairs 10-25 of a second molecule (e.g., RNA molecule) that is 50 base pairs in length. The definition of “segment,” unless otherwise specifically defined in a particular context, is not limited to a specific number of total base pairs, is not limited to any particular number of base pairs from a given nucleic acid molecule, is not limited to a particular number of separate molecules within a complex, and may include regions of nucleic acid molecules that are of any total length and may or may not include regions with complementarity to other molecules.

[0089] The first segment (targeting segment) of a guide nucleic acid comprises a nucleotide sequence that is complementary to a specific sequence (a target site) within a target nucleic acid (e.g, a target ssRNA, a target ssDNA, the complementary strand of a double stranded target DNA, etc.). The protein-binding segment (or “protein-binding sequence”) interacts with a Cas9 polypeptide. Site-specific binding and/or cleavage of the target nucleic acid can occur at locations determined by base-pairing complementarity between the guide nucleic acid and the target nucleic acid.

[0090] The protein-binding segment of a subject guide nucleic acid comprises two complementary stretches of nucleotides that hybridize to one another to form a double stranded RNA duplex (dsRNA duplex).

[0091] In some embodiments, a subject nucleic acid (e.g., a guide nucleic acid, a nucleic acid comprising a nucleotide sequence encoding a guide nucleic acid; a nucleic acid encoding a Cas9 polypeptide; a PAMmer, etc.) comprises a modification or sequence (e.g., an additional segment at the 5′ and/or 3′ end) that provides for an additional desirable feature (e.g., modified or regulated stability; subcellular targeting; tracking, e.g., a fluorescent label; a binding site for a protein or protein complex; etc.). Non-limiting examples include: a 5′ cap (e.g., a 7-methylguanylate cap (m7G)); a 3′ polyadenylated tail (i.e., a 3′ poly(A) tail); a ribozyme sequence (e.g. to allow for self-cleavage and release of a mature molecule in a regulated fashion); a riboswitch sequence (e.g., to allow for regulated stability and/or regulated accessibility by proteins and/or protein complexes); a stability control sequence; a sequence that forms a dsRNA duplex (i.e., a hairpin)); a modification or sequence that targets the nucleic acid to a subcellular location (e.g., nucleus, mitochondria, chloroplasts, and the like); a modification or sequence that provides for tracking (e.g., direct conjugation to a fluorescent molecule, conjugation to a moiety that facilitates fluorescent detection, a sequence that allows for fluorescent detection, etc.); a modification or sequence that provides a binding site for proteins (e.g., proteins that act on DNA and/or RNA, including transcriptional activators, transcriptional repressors, DNA methyltransferases, DNA demethylases, histone acetyltransferases, histone deacetylases, and the like); and combinations thereof.

[0092] A subject guide nucleic acid and a subject Cas9 polypeptide form a complex (i.e., bind via non-covalent interactions). The guide nucleic acid provides target specificity to the complex by comprising a nucleotide sequence that is complementary to a sequence of a target nucleic acid. The Cas9 polypeptide of the complex provides the site-specific activity. In other words, the Cas9 polypeptide is guided to a target nucleic acid sequence (e.g. a target sequence in a chromosomal nucleic acid; a target sequence in an extrachromosomal nucleic acid, e.g. an episomal nucleic acid, a minicircle, an ssRNA, an ssDNA, etc.; a target sequence in a mitochondrial nucleic acid; a target sequence in a chloroplast nucleic acid; a target sequence in a plasmid; etc.) by virtue of its association with the protein-binding segment of the guide nucleic acid.

[0093] In some embodiments, a subject guide nucleic acid comprises two separate nucleic acid molecules: an “activator” and a “targeter” (see below) and is referred to herein as a “dual guide nucleic acid”, a “double-molecule guide nucleic acid”, or a “two-molecule guide nucleic acid.” If both molecules of a dual guide nucleic acid are RNA molecules, the dual guide nucleic acid can be referred to as a “dual guide RNA” or a “dgRNA.” In some embodiments, the subject guide nucleic acid is a single nucleic acid molecule (single polynucleotide) and is referred to herein as a “single guide nucleic acid”, a “single-molecule guide nucleic acid,” or a “one-molecule guide nucleic acid.” If a single guide nucleic acid is an RNA molecule, it can be referred to as a “single guide RNA” or an “sgRNA.” The term “guide nucleic acid” is inclusive, referring to both dual guide nucleic acids and to single guide nucleic acids (e.g., dgRNAs, sgRNAs, etc.).

[0094] In some cases, a guide nucleic acid is a DNA/RNA hybrid molecule. In such cases, the protein-binding segment of the guide nucleic acid is RNA and forms an RNA duplex. However, the targeting segment of a guide nucleic acid can be DNA. Thus, if a DNA/RNA hybrid guide nucleic acid is a dual guide nucleic acid, the “targeter” molecule and be a hybrid molecule (e.g, the targeting segment can be DNA and the duplex-forming segment can be RNA). In such cases, the duplex-forming segment of the “activator” molecule can be RNA (e.g., in order to form an RNA-duplex with the duplex-forming segment of the targeter molecule), while nucleotides of the “activator” molecule that are outside of the duplex-forming segment can be DNA (in which case the activator molecule is a hybrid DNA/RNA molecule) or can be RNA (in which case the activator molecule is RNA). If a DNA/RNA hybrid guide nucleic acid is a single guide nucleic acid, then the targeting segment can be DNA, the duplex-forming segments (which make up the protein-binding segment) can be RNA, and nucleotides outside of the targeting and duplex-forming segments can be RNA or DNA.

[0095] An exemplary dual guide nucleic acid comprises a crRNA-like (“CRISPR RNA” or “targeter” or “crRNA” or “crRNA repeat”) molecule and a corresponding tracrRNA-like (“trans-acting CRISPR RNA” or “activator” or “tracrRNA”) molecule. A crRNA-like molecule (targeter) comprises both the targeting segment (single stranded) of the guide nucleic acid and a stretch (“duplex-forming segment”) of nucleotides that forms one half of the dsRNA duplex of the protein-binding segment of the guide nucleic acid. A corresponding tracrRNA-like molecule (activator) comprises a stretch of nucleotides (duplex-forming segment) that forms the other half of the dsRNA duplex of the protein-binding segment of the guide nucleic acid. In other words, a stretch of nucleotides of a crRNA-like molecule are complementary to and hybridize with a stretch of nucleotides of a tracrRNA-like molecule to form the dsRNA duplex of the protein-binding domain of the guide nucleic acid. As such, each crRNA-like molecule can be said to have a corresponding tracrRNA-like molecule. The crRNA-like molecule additionally provides the single stranded targeting segment. Thus, a crRNA-like and a tracrRNA-like molecule (as a corresponding pair) hybridize to form a dual guide nucleic acid. The exact sequence of a given crRNA or tracrRNA molecule is characteristic of the species in which the RNA molecules are found. Various suitable activators and targeters are depicted individually, as well as in corresponding complementary pairs in FIGS. 11-14 (described in more detail below). A subject dual guide nucleic acid can include any corresponding activator and targeter pair.

[0096] The term “activator” is used herein to mean a tracrRNA-like molecule of a dual guide nucleic acid (and of a single guide nucleic acid when the “activator” and the “targeter” are linked together by intervening nucleic acids). The term “targeter” is used herein to mean a crRNA-like molecule of a dual guide nucleic acid (and of a single guide nucleic acid when the “activator” and the “targeter” are linked together by intervening nucleic acids). The term “duplex-forming segment” is used herein to mean the stretch of nucleotides of an activator or a targeter that contributes to the formation of the dsRNA duplex by hybridizing to a stretch of nucleotides of a corresponding activator or targeter molecule. In other words, an activator comprises a duplex-forming segment that is complementary to the duplex-forming segment of the corresponding targeter. As such, an activator comprises a duplex-forming segment while a targeter comprises both a duplex-forming segment and the targeting segment of the guide nucleic acid. A subject single guide nucleic acid can comprise an “activator” and a “targeter” where the “activator” and the “targeter” are covalently linked (e.g., by intervening nucleotides). Therefore, a subject dual guide nucleic acid can be comprised of any corresponding activator and targeter pair.

[0097] A “host cell” or “target cell” as used herein, denotes an in vivo or in vitro eukaryotic cell, a prokaryotic cell (e.g., bacterial or archaeal cell), or a cell from a multicellular organism (e.g., a cell line) cultured as a unicellular entity, which eukaryotic or prokaryotic cells can be, or have been, used as recipients for a nucleic acid, and include the progeny of the original cell which has been transformed by the nucleic acid. It is understood that the progeny of a single cell may not necessarily be completely identical in morphology or in genomic or total DNA complement as the original parent, due to natural, accidental, or deliberate mutation. A “recombinant host cell” (also referred to as a “genetically modified host cell”) is a host cell into which has been introduced a heterologous nucleic acid, e.g., an expression vector. For example, a subject bacterial host cell is a genetically modified bacterial host cell by virtue of introduction into a suitable bacterial host cell of an exogenous nucleic acid (e.g., a plasmid or recombinant expression vector) and a subject eukaryotic host cell is a genetically modified eukaryotic host cell (e.g., a mammalian germ cell), by virtue of introduction into a suitable eukaryotic host cell of an exogenous nucleic acid.

[0098] The term “stem cell” is used herein to refer to a cell (e.g., plant stem cell, vertebrate stem cell) that has the ability both to self-renew and to generate a differentiated cell type (see Morrison et al. (1997) Cell 88:287-298). In the context of cell ontogeny, the adjective “differentiated”, or “differentiating” is a relative term. A “differentiated cell” is a cell that has progressed further down the developmental pathway than the cell it is being compared with. Thus, pluripotent stem cells (described below) can differentiate into lineage-restricted progenitor cells (e.g., mesodermal stem cells), which in turn can differentiate into cells that are further restricted (e.g., neuron progenitors), which can differentiate into end-stage cells (i.e., terminally differentiated cells, e.g., neurons, cardiomyocytes, etc.), which play a characteristic role in a certain tissue type, and may or may not retain the capacity to proliferate further. Stem cells may be characterized by both the presence of specific markers (e.g., proteins, RNAs, etc.) and the absence of specific markers. Stem cells may also be identified by functional assays both in vitro and in vivo, particularly assays relating to the ability of stem cells to give rise to multiple differentiated progeny.

[0099] Stem cells of interest include pluripotent stem cells (PSCs). The term “pluripotent stem cell” or “PSC” is used herein to mean a stem cell capable of producing all cell types of the organism. Therefore, a PSC can give rise to cells of all germ layers of the organism (e.g., the endoderm, mesoderm, and ectoderm of a vertebrate). Pluripotent cells are capable of forming teratomas and of contributing to ectoderm, mesoderm, or endoderm tissues in a living organism. Pluripotent stem cells of plants are capable of giving rise to all cell types of the plant (e.g., cells of the root, stem, leaves, etc.).

[0100] PSCs of animals can be derived in a number of different ways. For example, embryonic stem cells (ESCs) are derived from the inner cell mass of an embryo (Thomson et. al, Science. 1998 Nov. 6; 282(5391):1145-7) whereas induced pluripotent stem cells (iPSCs) are derived from somatic cells (Takahashi et. al, Cell. 2007 Nov. 30; 131(5):861-72; Takahashi et. al, Nat Protoc. 2007; 2(12):3081-9; Yu et. al, Science. 2007 Dec. 21; 318(5858):1917-20. Epub 2007 Nov. 20). Because the term PSC refers to pluripotent stem cells regardless of their derivation, the term PSC encompasses the terms ESC and iPSC, as well as the term embryonic germ stem cells (EGSC), which are another example of a PSC. PSCs may be in the form of an established cell line, they may be obtained directly from primary embryonic tissue, or they may be derived from a somatic cell. PSCs can be target cells of the methods described herein.

[0101] By “embryonic stem cell” (ESC) is meant a PSC that was isolated from an embryo, typically from the inner cell mass of the blastocyst. ESC lines are listed in the NIH Human Embryonic Stem Cell Registry, e.g. hESBGN-01, hESBGN-02, hESBGN-03, hESBGN-04 (BresaGen, Inc.); HES-1, HES-2, HES-3, HES-4, HES-5, HES-6 (ES Cell International); Miz-hES1 (MizMedi Hospital-Seoul National University); HSF-1, HSF-6 (University of California at San Francisco); and H1, H7, H9, H13, H14 (Wisconsin Alumni Research Foundation (WiCell Research Institute)). Stem cells of interest also include embryonic stem cells from other primates, such as Rhesus stem cells and marmoset stem cells. The stem cells may be obtained from any mammalian species, e.g. human, equine, bovine, porcine, canine, feline, rodent, e.g. mice, rats, hamster, primate, etc. (Thomson et al. (1998) Science 282:1145; Thomson et al. (1995) Proc. Natl. Acad. Sci USA 92:7844; Thomson et al. (1996) Biol. Reprod. 55:254; Shamblott et al., Proc. Natl. Acad. Sci. USA 95:13726, 1998). In culture, ESCs typically grow as flat colonies with large nucleo-cytoplasmic ratios, defined borders and prominent nucleoli. In addition, ESCs express SSEA-3, SSEA-4, TRA-1-60, TRA-1-81, and Alkaline Phosphatase, but not SSEA-1. Examples of methods of generating and characterizing ESCs may be found in, for example, U.S. Pat. No. 7,029,913, U.S. Pat. No. 5,843,780, and U.S. Pat. No. 6,200,806, the disclosures of which are incorporated herein by reference. Methods for proliferating hESCs in the undifferentiated form are described in WO 99/20741, WO 01/51616, and WO 03/020920.

[0102] By “embryonic germ stem cell” (EGSC) or “embryonic germ cell” or “EG cell” is meant a PSC that is derived from germ cells and/or germ cell progenitors, e.g. primordial germ cells, i.e. those that would become sperm and eggs. Embryonic germ cells (EG cells) are thought to have properties similar to embryonic stem cells as described above. Examples of methods of generating and characterizing EG cells may be found in, for example, U.S. Pat. No. 7,153,684; Matsui, Y., et al., (1992) Cell 70:841; Shamblott, M., et al. (2001) Proc. Natl. Acad. Sci. USA 98: 113; Shamblott, M., et al. (1998) Proc. Natl. Acad. Sci. USA, 95:13726; and Koshimizu, U., et al. (1996) Development, 122:1235, the disclosures of which are incorporated herein by reference.

[0103] By “induced pluripotent stem cell” or “iPSC” it is meant a PSC that is derived from a cell that is not a PSC (i.e., from a cell this is differentiated relative to a PSC). iPSCs can be derived from multiple different cell types, including terminally differentiated cells. iPSCs have an ES cell-like morphology, growing as flat colonies with large nucleo-cytoplasmic ratios, defined borders and prominent nuclei. In addition, iPSCs express one or more key pluripotency markers known by one of ordinary skill in the art, including but not limited to Alkaline Phosphatase, SSEA3, SSEA4, Sox2, Oct3/4, Nanog, TRA160, TRA181, TDGF 1, Dnmt3b, FoxD3, GDF3, Cyp26al, TERT, and zfp42. Examples of methods of generating and characterizing iPSCs may be found in, for example, U.S. Patent Publication Nos. US20090047263, US20090068742, US20090191159, US20090227032, US20090246875, and US20090304646, the disclosures of which are incorporated herein by reference. Generally, to generate iPSCs, somatic cells are provided with reprogramming factors (e.g. Oct4, SOX2, KLF4, MYC, Nanog, Lin28, etc.) known in the art to reprogram the somatic cells to become pluripotent stem cells.

[0104] By “somatic cell” it is meant any cell in an organism that, in the absence of experimental manipulation, does not ordinarily give rise to all types of cells in an organism. In other words, somatic cells are cells that have differentiated sufficiently that they will not naturally generate cells of all three germ layers of the body, i.e. ectoderm, mesoderm and endoderm. For example, somatic cells would include both neurons and neural progenitors, the latter of which may be able to naturally give rise to all or some cell types of the central nervous system but cannot give rise to cells of the mesoderm or endoderm lineages.

[0105] By “mitotic cell” it is meant a cell undergoing mitosis. Mitosis is the process by which a eukaryotic cell separates the chromosomes in its nucleus into two identical sets in two separate nuclei. It is generally followed immediately by cytokinesis, which divides the nuclei, cytoplasm, organelles and cell membrane into two cells containing roughly equal shares of these cellular components.

[0106] By “post-mitotic cell” it is meant a cell that has exited from mitosis, i.e., it is “quiescent”, i.e. it is no longer undergoing divisions. This quiescent state may be temporary, i.e. reversible, or it may be permanent.

[0107] By “meiotic cell” it is meant a cell that is undergoing meiosis. Meiosis is the process by which a cell divides its nuclear material for the purpose of producing gametes or spores Unlike mitosis, in meiosis, the chromosomes undergo a recombination step which shuffles genetic material between chromosomes. Additionally, the outcome of meiosis is four (genetically unique) haploid cells, as compared with the two (genetically identical) diploid cells produced from mitosis.

[0108] The terms “treatment”, “treating” and the like are used herein to generally mean obtaining a desired pharmacologic and/or physiologic effect. The effect may be prophylactic in terms of completely or partially preventing a disease or symptom thereof and/or may be therapeutic in terms of a partial or complete cure for a disease and/or adverse effect attributable to the disease. “Treatment” as used herein covers any treatment of a disease or symptom in a mammal, and includes: (a) preventing the disease or symptom from occurring in a subject which may be predisposed to acquiring the disease or symptom but has not yet been diagnosed as having it; (b) inhibiting the disease or symptom, i.e., arresting its development; or (c) relieving the disease, i.e., causing regression of the disease. The therapeutic agent may be administered before, during or after the onset of disease or injury. The treatment of ongoing disease, where the treatment stabilizes or reduces the undesirable clinical symptoms of the patient, is of particular interest. Such treatment is desirably performed prior to complete loss of function in the affected tissues. The subject therapy will desirably be administered during the symptomatic stage of the disease, and in some cases after the symptomatic stage of the disease.

[0109] The terms “individual,” “subject,” “host,” and “patient,” are used interchangeably herein and refer to any mammalian subject for whom diagnosis, treatment, or therapy is desired, particularly humans.

[0110] In some instances, a component (e.g., a nucleic acid component (e.g., a guide nucleic acid, a PAMmer, etc.); a protein component (e.g., a Cas9 polypeptide, a variant Cas9 polypeptide); and the like) includes a label moiety. The terms “label”, “detectable label”, or “label moiety” as used herein refer to any moiety that provides for signal detection and may vary widely depending on the particular nature of the assay. Label moieties of interest include both directly detectable labels (direct labels)(e.g., a fluorescent label) and indirectly detectable labels (indirect labels)(e.g., a binding pair member). A fluorescent label can be any fluorescent lable (e.g., a fluorescent dye (e.g., fluorescein, Texas red, rhodamine, ALEXAFLUOR® labels, and the like), a fluorescent protein (e.g., GFP, EGFP, YFP, RFP, CFP, YFP, cherry, tomato, tangerine, and any fluorescent derivative thereof), etc.). Suitable detectable (directly or indirectly) label moieties for use in the methods include any moiety that is detectable by spectroscopic, photochemical, biochemical, immunochemical, electrical, optical, chemical, or other means. For example, suitable indirect labels include biotin (a binding pair member), which can be bound by streptavidin (which can itself be directly or indirectly labeled). Labels can also include: a radiolabel (a direct label)(e.g., ³H, ¹²⁵I, ³⁵S, ¹⁴C, or ³²P); an enzyme (an indirect label)(e.g., peroxidase, alkaline phosphatase, galactosidase, luciferase, glucose oxidase, and the like); a fluorescent protein (a direct label)(e.g., green fluorescent protein, red fluorescent protein, yellow fluorescent protein, and any convenient derivatives thereof); a metal label (a direct label); a colorimetric label; a binding pair member; and the like. By “partner of a binding pair” or “binding pair member” is meant one of a first and a second moiety, wherein the first and the second moiety have a specific binding affinity for each other. Suitable binding pairs include, but are not limited to: antigen/antibodies (for example, digoxigenin/anti-digoxigenin, dinitrophenyl (DNP)/anti-DNP, dansyl-X-anti-dansyl, fluorescein/anti-fluorescein, lucifer yellow/anti-lucifer yellow, and rhodamine anti-rhodamine), biotin/avidin (or biotin/streptavidin) and calmodulin binding protein (CBP)/calmodulin. Any binding pair member can be suitable for use as an indirectly detectable label moiety.

[0111] Any given component, or combination of components can be unlabeled, or can be detectably labeled with a label moiety. In some cases, when two or more components are labeled, they can be labeled with label moieties that are distinguiahable from one another.

[0112] General methods in molecular and cellular biochemistry can be found in such standard textbooks as Molecular Cloning: A Laboratory Manual, 3rd Ed. (Sambrook et al., HaRBor Laboratory Press 2001); Short Protocols in Molecular Biology, 4th Ed. (Ausubel et al. eds., John Wiley & Sons 1999); Protein Methods (Bollag et al., John Wiley & Sons 1996); Nonviral Vectors for Gene Therapy (Wagner et al. eds., Academic Press 1999); Viral Vectors (Kaplift & Loewy eds., Academic Press 1995); Immunology Methods Manual (I. Lefkovits ed., Academic Press 1997); and Cell and Tissue Culture: Laboratory Procedures in Biotechnology (Doyle & Griffiths, John Wiley & Sons 1998), the disclosures of which are incorporated herein by reference.

[0113] Before the present invention is further described, it is to be understood that this invention is not limited to particular embodiments described, as such may, of course, vary. It is also to be understood that the terminology used herein is for the purpose of describing particular embodiments only, and is not intended to be limiting, since the scope of the present invention will be limited only by the appended claims.

[0114] Where a range of values is provided, it is understood that each intervening value, to the tenth of the unit of the lower limit unless the context clearly dictates otherwise, between the upper and lower limit of that range and any other stated or intervening value in that stated range, is encompassed within the invention. The upper and lower limits of these smaller ranges may independently be included in the smaller ranges, and are also encompassed within the invention, subject to any specifically excluded limit in the stated range. Where the stated range includes one or both of the limits, ranges excluding either or both of those included limits are also included in the invention.

[0115] Certain ranges are presented herein with numerical values being preceded by the term “about.” The term “about” is used herein to provide literal support for the exact number that it precedes, as well as a number that is near to or approximately the number that the term precedes. In determining whether a number is near to or approximately a specifically recited number, the near or approximating unrecited number may be a number which, in the context in which it is presented, provides the substantial equivalent of the specifically recited number.

[0116] Unless defined otherwise, all technical and scientific terms used herein have the same meaning as commonly understood by one of ordinary skill in the art to which this invention belongs. Although any methods and materials similar or equivalent to those described herein can also be used in the practice or testing of the present invention, the preferred methods and materials are now described. All publications mentioned herein are incorporated herein by reference to disclose and describe the methods and/or materials in connection with which the publications are cited.

[0117] All publications and patents cited in this specification are herein incorporated by reference as if each individual publication or patent were specifically and individually indicated to be incorporated by reference and are incorporated herein by reference to disclose and describe the methods and/or materials in connection with which the publications are cited. The citation of any publication is for its disclosure prior to the filing date and should not be construed as an admission that the present invention is not entitled to antedate such publication by virtue of prior invention. Further, the dates of publication provided may be different from the actual publication dates which may need to be independently confirmed.

[0118] It is noted that as used herein and in the appended claims, the singular forms “a,” “an,” and “the” include plural referents unless the context clearly dictates otherwise. Thus, for example, reference to “a polynucleotide” includes a plurality of such polynucleotides and reference to “the polypeptide” includes reference to one or more polypeptides and equivalents thereof known to those skilled in the art, and so forth. It is further noted that the claims may be drafted to exclude any optional element. As such, this statement is intended to serve as antecedent basis for use of such exclusive terminology as “solely,” “only” and the like in connection with the recitation of claim elements, or use of a “negative” limitation.

[0119] It is appreciated that certain features of the invention, which are, for clarity, described in the context of separate embodiments, may also be provided in combination in a single embodiment. Conversely, various features of the invention, which are, for brevity, described in the context of a single embodiment, may also be provided separately or in any suitable sub-combination. All combinations of the embodiments pertaining to the invention are specifically embraced by the present invention and are disclosed herein just as if each and every combination was individually and explicitly disclosed. In addition, all sub-combinations of the various embodiments and elements thereof are also specifically embraced by the present invention and are disclosed herein just as if each and every such sub-combination was individually and explicitly disclosed herein.

[0120] The publications discussed herein are provided solely for their disclosure prior to the filing date of the present application. Nothing herein is to be construed as an admission that the present invention is not entitled to antedate such publication by virtue of prior invention. Further, the dates of publication provided may be different from the actual publication dates which may need to be independently confirmed.

### DETAILED DESCRIPTION

[0121] The present disclosure provides compositions and methods for modifying (binding and/or cleaving) a single stranded target nucleic acid. A method of cleaving includes contacting a singled stranded target nucleic acid with (or introducing into a cell) a Cas9 polypeptide, a guide nucleic acid (e.g., a dual guide RNA, a single guide RNA, an RNA/DNA hybrid guide RNA, etc.), and a PAMmer. A subject PAMmer is a single stranded oligonucleotide having a protospacer adjacent motif (PAM) sequence and at least one of: (i) a specificity segment, positioned 5′ of the PAM sequence, having a nucleotide sequence that is complementary to a first target nucleotide sequence in the target nucleic acid (i.e., the target site); and (ii) an orientation segment, positioned 3′ of the PAM sequence, having a nucleotide sequence that is complementary to a second target nucleotide sequence in the target nucleic acid (i.e., the orientation site). A method of binding includes contacting a singled stranded target nucleic acid with (or introducing into a cell): (i) a variant Cas9 polypeptide having reduced or undetectable nuclease activity relative to a corresponding wild type Cas9 polypeptide; and (ii) a guide nucleic acid. In some cases, a method of binding includes contacting a singled stranded target nucleic acid with (or introducing into a cell): (i) a variant Cas9 polypeptide having reduced or undetectable nuclease activity relative to a corresponding wild type Cas9 polypeptide; (ii) a guide nucleic acid; and (iii) a PAMmer. In some cases, methods of binding are for visualizing single stranded target nucleic acids using a detectable label. In some cases, methods of binding are for isolating, collecting, and/or analyzing bound single stranded target nucleic acids and/or polypeptides associated with the bound single stranded target nucleic acids.

[0122] In some cases, a target nucleic acid is a single stranded RNA (ssRNA). In some cases, a target ssRNA (e.g., a target cell ssRNA, a viral ssRNA, etc.) is selected from: mRNA, rRNA, tRNA, non-coding RNA (ncRNA), long non-coding RNA (lncRNA), and microRNA (miRNA). In some cases, a target nucleic acid is a single stranded DNA (ssDNA) (e.g., a viral DNA). In some cases, a Cas9 polypeptide is conjugated to a PAMmer. In some cases, a guide nucleic acid is conjugated to a PAMmer. In some cases, a guide nucleic acid is a DNA/RNA hybrid guide nucleic acid where the segment that is complementary to a target nucleic acid (i.e., the targeting segment) has DNA and the segment that interacts with a Cas9 polypeptide (i.e., the protein-binding segment) has RNA. The subject methods can be performed outside of a cell in vitro, inside of a cell in vitro or ex vivo, and/or inside of a cell in vivo. Also provided are kits and libraries for performing the disclosed methods.

[0123] Throughout the description below, when referring to the components (e.g., a PAMmer, a guide nucleic acid, a Cas9 polypeptide, etc.) of subject compositions and methods, terms describing the components can also be provided as nucleic acids encoding the component. For example, when a composition or method includes a Cas9 polypeptide, it is understood that the Cas9 can be provided as the actual polypeptide or as a nucleic acid (DNA or RNA) encoding the same. Likewise, when a composition or method includes a PAMmer, it is understood that the PAMmer can be provided as the actual PAMmer or as a nucleic acid (DNA) encoding the same. For example, in some cases a PAMmer is DNA, in some cases a PAMmer is a modified nucleic acid, and in some cases a PAMmer is RNA, in which case the term “PAMmer” can be provided as the actual RNA PAMmer but also can be provided as a DNA encoding the RNA PAMmer. Likewise, when a composition or method includes a guide nucleic acid, it is understood that the guide nucleic acid can be provided as the actual guide nucleic acid or as a nucleic acid (DNA) encoding the same. For example, in some cases a guide nucleic acid is a modified nucleic acid, in some cases a guide nucleic acid is a DNA/RNA hybrid molecule, and in some cases a guide nucleic acid is RNA, in which case the guide nucleic acid can be provided as the actual guide RNA or as a DNA (e.g., plasmid) encoding the guide RNA.

### Compositions and Components

[0124] The present disclosure provides compositions for binding and/or cleaving a single stranded target nucleic acid. A composition for cleaving includes a PAMmer and at least one of: a guide nucleic acid (e.g., a dual guide RNA, a single guide RNA, an RNA/DNA hybrid guide RNA, etc.), and a Cas9 polypeptide. A composition for binding includes a guide nucleic acid (e.g., a dual guide RNA, a single guide RNA, an RNA/DNA hybrid guide RNA, etc.) and a Cas9 polypeptide. A composition for binding can also include a PAMmer.

[0125] FIG. 8 (A-D) presents a schematic depiction of exemplary embodiments of the present disclosure.

### Guide Nucleic Acid

[0126] The present disclosure provides a guide nucleic acid that directs the activities of an associated polypeptide (e.g., a Cas9 polypeptide) to a specific target sequence within a target nucleic acid. A subject guide nucleic acid comprises: a first segment (also referred to herein as a “nucleic acid targeting segment”, or simply a “targeting segment”); and a second segment (also referred to herein as a “protein-binding segment”).

[0127] First Segment: Targeting Segment

[0128] The first segment of a subject guide nucleic acid comprises a nucleotide sequence that can be complementary to a sequence (a target site) in a target nucleic acid. In other words, the targeting segment of a subject guide nucleic acid can interact with a target nucleic acid (e.g., a single stranded RNA (sRNA) and/or a single stranded DNA (ssDNA)) in a sequence-specific manner via hybridization (i.e., base pairing). As such, the nucleotide sequence of the targeting segment may vary and can determine the location within the target nucleic acid that the guide nucleic acid and the target nucleic acid will interact. The targeting segment of a subject guide nucleic acid can be modified (e.g., by genetic engineering) to hybridize to any desired sequence (target site) within a target nucleic acid.

[0129] The targeting segment can have a length of from about 12 nucleotides to about 100 nucleotides. For example, the targeting segment can have a length of from about 12 nucleotides (nt) to about 80 nt, from about 12 nt to about 50 nt, from about 12 nt to about 40 nt, from about 12 nt to about 30 nt, from about 12 nt to about 25 nt, from about 12 nt to about 20 nt, or from about 12 nt to about 19 nt. For example, the targeting segment can have a length of from about 19 nt to about 20 nt, from about 19 nt to about 25 nt, from about 19 nt to about 30 nt, from about 19 nt to about 35 nt, from about 19 nt to about 40 nt, from about 19 nt to about 45 nt, from about 19 nt to about 50 nt, from about 19 nt to about 60 nt, from about 19 nt to about 70 nt, from about 19 nt to about 80 nt, from about 19 nt to about 90 nt, from about 19 nt to about 100 nt, from about 20 nt to about 25 nt, from about 20 nt to about 30 nt, from about 20 nt to about 35 nt, from about 20 nt to about 40 nt, from about 20 nt to about 45 nt, from about 20 nt to about 50 nt, from about 20 nt to about 60 nt, from about 20 nt to about 70 nt, from about 20 nt to about 80 nt, from about 20 nt to about 90 nt, or from about 20 nt to about 100 nt.

[0130] The nucleotide sequence (the targeting sequence) of the targeting segment that is complementary to a nucleotide sequence (target site) of the target nucleic acid can have a length of 12 nt or more. For example, the targeting sequence of the targeting segment that is complementary to a target site of the target nucleic acid can have a length of 12 nt or more, 15 nt or more, 18 nt or more, 19 nt or more, 20 nt or more, 25 nt or more, 30 nt or more, 35 nt or more or 40 nt. For example, the targeting sequence of the targeting segment that is complementary to a target sequence of the target nucleic acid can have a length of from about 12 nucleotides (nt) to about 80 nt, from about 12 nt to about 50 nt, from about 12 nt to about 45 nt, from about 12 nt to about 40 nt, from about 12 nt to about 35 nt, from about 12 nt to about 30 nt, from about 12 nt to about 25 nt, from about 12 nt to about 20 nt, from about 12 nt to about 19 nt, from about 19 nt to about 20 nt, from about 19 nt to about 25 nt, from about 19 nt to about 30 nt, from about 19 nt to about 35 nt, from about 19 nt to about 40 nt, from about 19 nt to about 45 nt, from about 19 nt to about 50 nt, from about 19 nt to about 60 nt, from about 20 nt to about 25 nt, from about 20 nt to about 30 nt, from about 20 nt to about 35 nt, from about 20 nt to about 40 nt, from about 20 nt to about 45 nt, from about 20 nt to about 50 nt, or from about 20 nt to about 60 nt. The nucleotide sequence (the targeting sequence) of the targeting segment that is complementary to a nucleotide sequence (target site) of the target nucleic acid can have a length of 12 nt or more.

[0131] In some cases, the targeting sequence of the targeting segment that is complementary to a target site of the target nucleic acid is 20 nucleotides in length. In some cases, the targeting sequence of the targeting segment that is complementary to a target site of the target nucleic acid is 19 nucleotides in length.

[0132] The percent complementarity between the targeting sequence of the targeting segment and the target site of the target nucleic acid can be 60% or more (e.g., 65% or more, 70% or more, 75% or more, 80% or more, 85% or more, 90% or more, 95% or more, 97% or more, 98% or more, 99% or more, or 100%). In some cases, the percent complementarity between the targeting sequence of the targeting segment and the target site of the target nucleic acid is 100% over the seven contiguous 5′-most nucleotides of the target site of the target nucleic acid. In some cases, the percent complementarity between the targeting sequence of the targeting segment and the target site of the target nucleic acid is 60% or more over about 20 contiguous nucleotides. In some cases, the percent complementarity between the targeting sequence of the targeting segment and the target site of the target nucleic acid is 100% over the fourteen contiguous 5′-most nucleotides of the target site of the target nucleic acid and as low as 0% or more over the remainder. In such a case, the targeting sequence can be considered to be 14 nucleotides in length. In some cases, the percent complementarity between the targeting sequence of the targeting segment and the target site of the target nucleic acid is 100% over the seven contiguous 5′-most nucleotides of the target site of the target nucleic acid and as low as 0% or more over the remainder. In such a case, the targeting sequence can be considered to be 20 nucleotides in length.

[0133] Where a method of binding is to be performed, the targeting segment of the guide nucleic acid does not need to have complementarity to the region of the target nucleic acid that will be bound (i.e., the target site). For example, in some such cases, the orientation segment of the PAMmer determines the target site of the target nucleic acid (i.e., in such cases, the target site is not defined by complementarity to the guide nucleic acid). For example, in some cases, for a method of binding, when the PAMmer does not have a specificity segment, the guide nucleic acid need not have complementarity to the target nucleic acid, and the binding of the Cas9 polypeptide to the target nucleic acid is determined by the orientation segment of the PAMmer. In other words, a Cas9 polypeptide:guide nucleic acid complex can bind to a single stranded target nucleic acid when the orientation segment of the PAMmer binds to the target nucleic acid, and the complex does not require that the targeting segment of the guide nucleic acid has complementarity to the target nucleic acid (see FIGS. 5 and 8).

[0134] As another example, in some cases (e.g., for a method of binding), when the PAMmer has a specificity segment that is 10 nucleotides (nt) or less (e.g., 9 nt or less, 8 nt or less, 7 nt or less, 6 nt or less, 5 nt or less, 4 nt or less, 3 nt or less, 2 nt or less, or 1 nt or less), the guide nucleic acid need not have complementarity to the target nucleic acid, and the binding of the Cas9 polypeptide to the target nucleic acid can be determined by the orientation segment of the PAMmer (i.e., the Cas9 polypeptide:guide nucleic acid complex will bind to a single stranded target nucleic acid when the orientation segment of the PAMmer binds to the target nucleic acid).

[0135] Second Segment: Protein-Binding Segment

[0136] The protein-binding segment of a subject guide nucleic acid interacts with a Cas9 polypeptide. The subject guide nucleic acid guides the bound polypeptide to a specific nucleotide sequence within target nucleic acid via the above mentioned targeting segment. The protein-binding segment of a subject guide nucleic acid comprises two stretches of nucleotides that are complementary to one another. The complementary nucleotides of the protein-binding segment hybridize to form a double stranded RNA duplex (dsRNA) (see FIGS. 8A and 8B).

[0137] A subject dual guide nucleic acid comprises two separate nucleic acid molecules. Each of the two molecules of a subject dual guide nucleic acid comprises a stretch of nucleotides that are complementary to one another such that the complementary nucleotides of the two molecules hybridize to form the double stranded RNA duplex of the protein-binding segment (FIG. 8A).

[0138] In some embodiments, the duplex-forming segment of the activator is 60% or more identical to one of the activator (tracrRNA) molecules set forth in SEQ ID NOs:431-562, or a complement thereof, over a stretch of 8 or more contiguous nucleotides (e.g., 8 or more contiguous nucleotides, 10 or more contiguous nucleotides, 12 or more contiguous nucleotides, 15 or more contiguous nucleotides, or 20 or more contiguous nucleotides). For example, the duplex-forming segment of the activator (or the DNA encoding the duplex-forming segment of the activator) can be 65% or more identical to one of the tracrRNA sequences set forth in SEQ ID NOs:431-562, or a complement thereof, over a stretch of 8 or more contiguous nucleotides (e.g., 8 or more contiguous nucleotides, 10 or more contiguous nucleotides, 12 or more contiguous nucleotides, 15 or more contiguous nucleotides, or 20 or more contiguous nucleotides).

[0139] The duplex-forming segment of the activator (or the DNA encoding the duplex-forming segment of the activator) can be 70% or more identical to one of the tracrRNA sequences set forth in SEQ ID NOs:431-562, or a complement thereof, over a stretch of 8 or more contiguous nucleotides (e.g., 8 or more contiguous nucleotides, 10 or more contiguous nucleotides, 12 or more contiguous nucleotides, 15 or more contiguous nucleotides, or 20 or more contiguous nucleotides).

[0140] The duplex-forming segment of the activator (or the DNA encoding the duplex-forming segment of the activator) can be 75% or more identical to one of the tracrRNA sequences set forth in SEQ ID NOs:431-562, or a complement thereof, over a stretch of 8 or more contiguous nucleotides (e.g., 8 or more contiguous nucleotides, 10 or more contiguous nucleotides, 12 or more contiguous nucleotides, 15 or more contiguous nucleotides, or 20 or more contiguous nucleotides).

[0141] The duplex-forming segment of the activator (or the DNA encoding the duplex-forming segment of the activator) can be 80% or more identical to one of the tracrRNA sequences set forth in SEQ ID NOs:431-562, or a complement thereof, over a stretch of 8 or more contiguous nucleotides (e.g., 8 or more contiguous nucleotides, 10 or more contiguous nucleotides, 12 or more contiguous nucleotides, 15 or more contiguous nucleotides, or 20 or more contiguous nucleotides).

[0142] The duplex-forming segment of the activator (or the DNA encoding the duplex-forming segment of the activator) can be 85% or more identical to one of the tracrRNA sequences set forth in SEQ ID NOs:431-562, or a complement thereof, over a stretch of 8 or more contiguous nucleotides (e.g., 8 or more contiguous nucleotides, 10 or more contiguous nucleotides, 12 or more contiguous nucleotides, 15 or more contiguous nucleotides, or 20 or more contiguous nucleotides).

[0143] The duplex-forming segment of the activator (or the DNA encoding the duplex-forming segment of the activator) can be 90% or more identical to one of the tracrRNA sequences set forth in SEQ ID NOs:431-562, or a complement thereof, over a stretch of 8 or more contiguous nucleotides (e.g., 8 or more contiguous nucleotides, 10 or more contiguous nucleotides, 12 or more contiguous nucleotides, 15 or more contiguous nucleotides, or 20 or more contiguous nucleotides).

[0144] The duplex-forming segment of the activator (or the DNA encoding the duplex-forming segment of the activator) can be 95% or more identical to one of the tracrRNA sequences set forth in SEQ ID NOs:431-562, or a complement thereof, over a stretch of 8 or more contiguous nucleotides (e.g., 8 or more contiguous nucleotides, 10 or more contiguous nucleotides, 12 or more contiguous nucleotides, 15 or more contiguous nucleotides, or 20 or more contiguous nucleotides).

[0145] The duplex-forming segment of the activator (or the DNA encoding the duplex-forming segment of the activator) can be 98% or more identical to one of the tracrRNA sequences set forth in SEQ ID NOs:431-562, or a complement thereof, over a stretch of 8 or more contiguous nucleotides (e.g., 8 or more contiguous nucleotides, 10 or more contiguous nucleotides, 12 or more contiguous nucleotides, 15 or more contiguous nucleotides, or 20 or more contiguous nucleotides).

[0146] The duplex-forming segment of the activator (or the DNA encoding the duplex-forming segment of the activator) can be 99% or more identical to one of the tracrRNA sequences set forth in SEQ ID NOs:431-562, or a complement thereof, over a stretch of 8 or more contiguous nucleotides (e.g., 8 or more contiguous nucleotides, 10 or more contiguous nucleotides, 12 or more contiguous nucleotides, 15 or more contiguous nucleotides, or 20 or more contiguous nucleotides).

[0147] The duplex-forming segment of the activator (or the DNA encoding the duplex-forming segment of the activator) can be 100% identical to one of the tracrRNA sequences set forth in SEQ ID NOs:431-562, or a complement thereof, over a stretch of 8 or more contiguous nucleotides (e.g., 8 or more contiguous nucleotides, 10 or more contiguous nucleotides, 12 or more contiguous nucleotides, 15 or more contiguous nucleotides, or 20 or more contiguous nucleotides).

[0148] In some embodiments, the duplex-forming segment of the targeter is 60% or more identical to one of the targeter (crRNA) sequences set forth in SEQ ID NOs:563-679, or a complement thereof, over a stretch of 8 or more contiguous nucleotides (e.g., 8 or more contiguous nucleotides, 10 or more contiguous nucleotides, 12 or more contiguous nucleotides, 15 contiguous or more contiguous nucleotides, or 20 or more contiguous nucleotides). For example, the duplex-forming segment of the targeter (or the DNA encoding the duplex-forming segment of the targeter) can be 65% or more identical to one of the crRNA sequences set forth in SEQ ID NOs:563-679, or a complement thereof, over a stretch of 8 or more contiguous nucleotides (e.g., 8 or more contiguous nucleotides, 10 or more contiguous nucleotides, 12 or more contiguous nucleotides, 15 or more contiguous nucleotides, or 20 or more contiguous nucleotides).

[0149] The duplex-forming segment of the targeter (or the DNA encoding the duplex-forming segment of the targeter) can be 70% or more identical to one of the crRNA sequences set forth in SEQ ID NOs:563-679, or a complement thereof, over a stretch of 8 or more contiguous nucleotides (e.g., 8 or more contiguous nucleotides, 10 or more contiguous nucleotides, 12 or more contiguous nucleotides, 15 or more contiguous nucleotides, or 20 or more contiguous nucleotides).

[0150] The duplex-forming segment of the targeter (or the DNA encoding the duplex-forming segment of the targeter) can be 75% or more identical to one of the crRNA sequences set forth in SEQ ID NOs:563-679, or a complement thereof, over a stretch of 8 or more contiguous nucleotides (e.g., 8 or more contiguous nucleotides, 10 or more contiguous nucleotides, 12 or more contiguous nucleotides, 15 or more contiguous nucleotides, or 20 or more contiguous nucleotides).

[0151] The duplex-forming segment of the targeter (or the DNA encoding the duplex-forming segment of the targeter) can be 80% or more identical to one of the crRNA sequences set forth in SEQ ID NOs:563-679, or a complement thereof, over a stretch of 8 or more contiguous nucleotides (e.g., 8 or more contiguous nucleotides, 10 or more contiguous nucleotides, 12 or more contiguous nucleotides, 15 or more contiguous nucleotides, or 20 or more contiguous nucleotides).

[0152] The duplex-forming segment of the targeter (or the DNA encoding the duplex-forming segment of the targeter) can be 85% or more identical to one of the crRNA sequences set forth in SEQ ID NOs:563-679, or a complement thereof, over a stretch of 8 or more contiguous nucleotides (e.g., 8 or more contiguous nucleotides, 10 or more contiguous nucleotides, 12 or more contiguous nucleotides, 15 or more contiguous nucleotides, or 20 or more contiguous nucleotides).

[0153] The duplex-forming segment of the targeter (or the DNA encoding the duplex-forming segment of the targeter) can be 90% or more identical to one of the crRNA sequences set forth in SEQ ID NOs:563-679, or a complement thereof, over a stretch of 8 or more contiguous nucleotides (e.g., 8 or more contiguous nucleotides, 10 or more contiguous nucleotides, 12 or more contiguous nucleotides, 15 or more contiguous nucleotides, or 20 or more contiguous nucleotides).

[0154] The duplex-forming segment of the targeter (or the DNA encoding the duplex-forming segment of the targeter) can be 95% or more identical to one of the crRNA sequences set forth in SEQ ID NOs:563-679, or a complement thereof, over a stretch of 8 or more contiguous nucleotides (e.g., 8 or more contiguous nucleotides, 10 or more contiguous nucleotides, 12 or more contiguous nucleotides, 15 or more contiguous nucleotides, or 20 or more contiguous nucleotides).

[0155] The duplex-forming segment of the targeter (or the DNA encoding the duplex-forming segment of the targeter) can be 98% or more identical to one of the crRNA sequences set forth in SEQ ID NOs:563-679, or a complement thereof, over a stretch of 8 or more contiguous nucleotides (e.g., 8 or more contiguous nucleotides, 10 or more contiguous nucleotides, 12 or more contiguous nucleotides, 15 or more contiguous nucleotides, or 20 or more contiguous nucleotides).

[0156] The duplex-forming segment of the targeter (or the DNA encoding the duplex-forming segment of the targeter) can be 99% or more identical to one of the crRNA sequences set forth in SEQ ID NOs:563-679, or a complement thereof, over a stretch of 8 or more contiguous nucleotides (e.g., 8 or more contiguous nucleotides, 10 or more contiguous nucleotides, 12 or more contiguous nucleotides, 15 or more contiguous nucleotides, or 20 or more contiguous nucleotides).

[0157] The duplex-forming segment of the targeter (or the DNA encoding the duplex-forming segment of the targeter) can be 100% identical to one of the crRNA sequences set forth in SEQ ID NOs:563-679, or a complement thereof, over a stretch of 8 or more contiguous nucleotides (e.g., 8 or more contiguous nucleotides, 10 or more contiguous nucleotides, 12 or more contiguous nucleotides, 15 or more contiguous nucleotides, or 20 or more contiguous nucleotides).

[0158] A dual guide nucleic acid can be designed to allow for controlled (i.e., conditional) binding of a targeter with an activator. Because a dual guide nucleic acid is not functional unless both the activator and the targeter are bound in a functional complex with Cas9, a dual guide nucleic acid can be inducible (e.g., drug inducible) by rendering the binding between the activator and the targeter to be inducible. As one non-limiting example, RNA aptamers can be used to regulate (i.e., control) the binding of the activator with the targeter. Accordingly, the activator and/or the targeter can include an RNA aptamer sequence.

[0159] Aptamers (e.g., RNA aptamers) are known in the art and are generally a synthetic version of a riboswitch. The terms “RNA aptamer” and “riboswitch” are used interchangeably herein to encompass both synthetic and natural nucleic acid sequences that provide for inducible regulation of the structure (and therefore the availability of specific sequences) of the nucleic acid molecule (e.g., RNA, DNA/RNA hybrid, etc.) of which they are part. RNA aptamers usually comprise a sequence that folds into a particular structure (e.g., a hairpin), which specifically binds a particular drug (e.g., a small molecule). Binding of the drug causes a structural change in the folding of the RNA, which changes a feature of the nucleic acid of which the aptamer is a part. As non-limiting examples: (i) an activator with an aptamer may not be able to bind to the cognate targeter unless the aptamer is bound by the appropriate drug; (ii) a targeter with an aptamer may not be able to bind to the cognate activator unless the aptamer is bound by the appropriate drug; and (iii) a targeter and an activator, each comprising a different aptamer that binds a different drug, may not be able to bind to each other unless both drugs are present. As illustrated by these examples, a dual guide nucleic acid can be designed to be inducible.

[0160] Examples of aptamers and riboswitches can be found, for example, in: Nakamura et al., Genes Cells. 2012 May; 17(5):344-64; Vavalle et al., Future Cardiol. 2012 May; 8(3):371-82; Citartan et al., Biosens Bioelectron. 2012 Apr. 15; 34(1):1-11; and Liberman et al., Wiley Interdiscip Rev RNA. 2012 May-June; 3(3):369-84; all of which are herein incorporated by reference in their entirety.

[0161] Non-limiting examples of nucleotide sequences that can be included in a dual guide nucleic acid include either of the sequences set forth in SEQ ID NOs:431-562, or complements thereof pairing with any sequences set forth in SEQ ID NOs:563-679, or complements thereof that can hybridize to form a protein binding segment.

[0162] A subject single guide nucleic acid comprises two stretches of nucleotides (much like a “targeter” and an “activator” of a dual guide nucleic acid) that are complementary to one another, hybridize to form the double stranded RNA duplex (dsRNA duplex) of the protein-binding segment (thus resulting in a stem-loop structure), and are covalently linked by intervening nucleotides (“linkers” or “linker nucleotides”). Thus, a subject single guide nucleic acid (e.g., a single guide RNA) can comprise a targeter and an activator, each having a duplex-forming segment, where the duplex-forming segments of the targeter and the activator hybridize with one another to form a dsRNA duplex. The targeter and the activator can be covalently linked via the 3′ end of the targeter and the 5′ end of the activator (see FIG. 8B). Alternatively, targeter and the activator can be covalently linked via the 5′ end of the targeter and the 3′ end of the activator.

[0163] The linker of a single guide nucleic acid can have a length of from about 3 nucleotides to about 100 nucleotides. For example, the linker can have a length of from about 3 nucleotides (nt) to about 90 nt, from about 3 nucleotides (nt) to about 80 nt, from about 3 nucleotides (nt) to about 70 nt, from about 3 nucleotides (nt) to about 60 nt, from about 3 nucleotides (nt) to about 50 nt, from about 3 nucleotides (nt) to about 40 nt, from about 3 nucleotides (nt) to about 30 nt, from about 3 nucleotides (nt) to about 20 nt or from about 3 nucleotides (nt) to about 10 nt. For example, the linker can have a length of from about 3 nt to about 5 nt, from about 5 nt to about 10 nt, from about 10 nt to about 15 nt, from about 15 nt to about 20 nt, from about 20 nt to about 25 nt, from about 25 nt to about 30 nt, from about 30 nt to about 35 nt, from about 35 nt to about 40 nt, from about 40 nt to about 50 nt, from about 50 nt to about 60 nt, from about 60 nt to about 70 nt, from about 70 nt to about 80 nt, from about 80 nt to about 90 nt, or from about 90 nt to about 100 nt. In some embodiments, the linker of a single guide nucleic acid is 4 nt.

[0164] An exemplary single guide nucleic acid comprises two complementary stretches of nucleotides that hybridize to form a dsRNA duplex. In some embodiments, one of the two complementary stretches of nucleotides of the single guide nucleic acid (or the DNA encoding the stretch) is 60% or more identical to one of the activator (tracrRNA) molecules set forth in SEQ ID NOs:431-562, or a complement thereof, over a stretch of 8 or more contiguous nucleotides (e.g., 8 or more contiguous nucleotides, 10 or more contiguous nucleotides, 12 or more contiguous nucleotides, 15 or more contiguous nucleotides, or 20 or more contiguous nucleotides). For example, one of the two complementary stretches of nucleotides of the single guide nucleic acid (or the DNA encoding the stretch) is 65% or more identical, 70% or more identical, 75% or more identical, 80% or more identical, 85% or more identical, 90% or more identical, 95% or more identical, 98% or more identical, 99% or more identical or 100% identical to one of the tracrRNA sequences set forth in SEQ ID NOs:431-562, or a complement thereof, over a stretch of 8 or more contiguous nucleotides (e.g., 8 or more contiguous nucleotides, 10 or more contiguous nucleotides, 12 or more contiguous nucleotides, 15 or more contiguous nucleotides, or 20 or more contiguous nucleotides).

[0165] In some embodiments, one of the two complementary stretches of nucleotides of the single guide nucleic acid (or the DNA encoding the stretch) is 60% or more identical to one of the targeter (crRNA) sequences set forth in SEQ ID NOs:563-679, or a complement thereof, over a stretch of 8 or more contiguous nucleotides (e.g., 8 or more contiguous nucleotides, 10 or more contiguous nucleotides, 12 or more contiguous nucleotides, 15 or more contiguous nucleotides, or 20 or more contiguous nucleotides). For example, one of the two complementary stretches of nucleotides of the single guide nucleic acid (or the DNA encoding the stretch) is 65% or more identical, 70% or more identical, 75% or more identical, 80% or more identical, 85% or more identical, 90% or more identical, 95% or more identical, 98% or more identical, 99% or more identical or 100% identical to one of the crRNA sequences set forth in SEQ ID NOs:563-679, or a complement thereof, over a stretch of 8 or more contiguous nucleotides (e.g., 8 or more contiguous nucleotides, 10 or more contiguous nucleotides, 12 or more contiguous nucleotides, 15 or more contiguous nucleotides, or 20 or more contiguous nucleotides).

[0166] In some embodiments, one of the two complementary stretches of nucleotides of the single guide nucleic acid (or the DNA encoding the stretch) is 60% or more identical to one of the targeter (crRNA) sequences or activator (tracrRNA) sequences set forth in SEQ ID NOs: 431-679, or a complement thereof, over a stretch of 8 or more contiguous nucleotides (e.g., 8 or more contiguous nucleotides, 10 or more contiguous nucleotides, 12 or more contiguous nucleotides, 15 or more contiguous nucleotides, or 20 or more contiguous nucleotides). For example, one of the two complementary stretches of nucleotides of the single guide nucleic acid (or the DNA encoding the stretch) can be 65% or more identical to one of the sequences set forth in SEQ ID NOs: 431-679, or a complement thereof, over a stretch of 8 or more contiguous nucleotides (e.g., 8 or more contiguous nucleotides, 10 or more contiguous nucleotides, 12 or more contiguous nucleotides, 15 or more contiguous nucleotides, or 20 or more contiguous nucleotides).

[0167] One of the two complementary stretches of nucleotides of the single guide nucleic acid (or the DNA encoding the stretch) can be 70% or more identical to one of the sequences set forth in SEQ ID NOs: 431-679, or a complement thereof, over a stretch of 8 or more contiguous nucleotides (e.g., 8 or more contiguous nucleotides, 10 or more contiguous nucleotides, 12 or more contiguous nucleotides, 15 or more contiguous nucleotides, or 20 or more contiguous nucleotides).

[0168] One of the two complementary stretches of nucleotides of the single guide nucleic acid (or the DNA encoding the stretch) can be 75% or more identical to one of the sequences set forth in SEQ ID NOs: 431-679, or a complement thereof, over a stretch of 8 or more contiguous nucleotides (e.g., 8 or more contiguous nucleotides, 10 or more contiguous nucleotides, 12 or more contiguous nucleotides, 15 or more contiguous nucleotides, or 20 or more contiguous nucleotides)

[0169] One of the two complementary stretches of nucleotides of the single guide nucleic acid (or the DNA encoding the stretch) can be 80% or more identical to one of the sequences set forth in SEQ ID NOs: 431-679, or a complement thereof, over a stretch of 8 or more contiguous nucleotides (e.g., 8 or more contiguous nucleotides, 10 or more contiguous nucleotides, 12 or more contiguous nucleotides, 15 or more contiguous nucleotides, or 20 or more contiguous nucleotides).

[0170] One of the two complementary stretches of nucleotides of the single guide nucleic acid (or the DNA encoding the stretch) can be 85% or more identical to one of the sequences set forth in SEQ ID NOs: 431-679, or a complement thereof, over a stretch of 8 or more contiguous nucleotides (e.g., 8 or more contiguous nucleotides, 10 or more contiguous nucleotides, 12 or more contiguous nucleotides, 15 or more contiguous nucleotides, or 20 or more contiguous nucleotides).

[0171] One of the two complementary stretches of nucleotides of the single guide nucleic acid (or the DNA encoding the stretch) can be 90% or more identical to one of the sequences set forth in SEQ ID NOs: 431-679, or a complement thereof, over a stretch of 8 or more contiguous nucleotides (e.g., 8 or more contiguous nucleotides, 10 or more contiguous nucleotides, 12 or more contiguous nucleotides, 15 or more contiguous nucleotides, or 20 or more contiguous nucleotides).

[0172] One of the two complementary stretches of nucleotides of the single guide nucleic acid (or the DNA encoding the stretch) can be 95% or more identical to one of the sequences set forth in SEQ ID NOs: 431-679, or a complement thereof, over a stretch of 8 or more contiguous nucleotides (e.g., 8 or more contiguous nucleotides, 10 or more contiguous nucleotides, 12 or more contiguous nucleotides, 15 or more contiguous nucleotides, or 20 or more contiguous nucleotides).

[0173] One of the two complementary stretches of nucleotides of the single guide nucleic acid (or the DNA encoding the stretch) can be 98% or more identical to one of the sequences set forth in SEQ ID NOs: 431-679, or a complement thereof, over a stretch of 8 or more contiguous nucleotides (e.g., 8 or more contiguous nucleotides, 10 or more contiguous nucleotides, 12 or more contiguous nucleotides, 15 or more contiguous nucleotides, or 20 or more contiguous nucleotides).

[0174] One of the two complementary stretches of nucleotides of the single guide nucleic acid (or the DNA encoding the stretch) can be 99% or more identical to one of the sequences set forth in SEQ ID NOs: 431-679, or a complement thereof, over a stretch of 8 or more contiguous nucleotides (e.g., 8 or more contiguous nucleotides, 10 or more contiguous nucleotides, 12 or more contiguous nucleotides, 15 or more contiguous nucleotides, or 20 or more contiguous nucleotides).

[0175] One of the two complementary stretches of nucleotides of the single guide nucleic acid (or the DNA encoding the stretch) can be 100% identical to one of the sequences set forth in SEQ ID NOs: 431-679, or a complement thereof, over a stretch of 8 or more contiguous nucleotides (e.g., 8 or more contiguous nucleotides, 10 or more contiguous nucleotides, 12 or more contiguous nucleotides, 15 or more contiguous nucleotides, or 20 or more contiguous nucleotides).

[0176] Appropriate cognate pairs of targeters and activators can be routinely determined for SEQ ID NOs:431-679 by taking into account the species name and base-pairing (for the dsRNA duplex of the protein-binding domain) (see FIG. 11, FIG. 12, FIG. 13, and FIG. 14 for non-limiting examples of activator sequences, targeter sequences, paired activator/targeter sequences, and single guide nucleic acid sequences designed from corresponding activator/targeter pairs). Any activator/targeter pair can be used as part of subject dual guide nucleic acid or as part of a subject single guide nucleic acid.

[0177] In some cases, an activator (e.g., a trRNA, trRNA-like molecule, etc.) of a dual guide nucleic acid (e.g., a dual guide RNA) or a single guide nucleic acid (e.g., a single guide RNA) includes a stretch of nucleotides with 60% or more sequence identity (e.g., 65% or more, 70% or more, 75% or more, 80% or more, 85% or more, 90% or more, 95% or more, 98% or more, or 100% sequence identity) with an activator (tracrRNA) molecule set forth in any one of SEQ ID NOs:431-562, and 1535-1544, or a complement thereof. In some cases, an activator (e.g., a trRNA, trRNA-like molecule, etc.) of a dual guide nucleic acid (e.g., a dual guide RNA) or a single guide nucleic acid (e.g., a single guide RNA) includes a stretch of nucleotides with 70% or more sequence identity with an activator (tracrRNA) molecule set forth in any one of SEQ ID NOs:431-562, and 1535-1544, or a complement thereof. In some cases, an activator (e.g., a trRNA, trRNA-like molecule, etc.) of a dual guide nucleic acid (e.g., a dual guide RNA) or a single guide nucleic acid (e.g., a single guide RNA) includes a stretch of nucleotides with 75% or more sequence identity with an activator (tracrRNA) molecule set forth in any one of SEQ ID NOs:431-562, and 1535-1544, or a complement thereof. In some cases, an activator (e.g., a trRNA, trRNA-like molecule, etc.) of a dual guide nucleic acid (e.g., a dual guide RNA) or a single guide nucleic acid (e.g., a single guide RNA) includes a stretch of nucleotides with 80% or more sequence identity with an activator (tracrRNA) molecule set forth in any one of SEQ ID NOs:431-562, and 1535-1544, or a complement thereof. In some cases, an activator (e.g., a trRNA, trRNA-like molecule, etc.) of a dual guide nucleic acid (e.g., a dual guide RNA) or a single guide nucleic acid (e.g., a single guide RNA) includes a stretch of nucleotides with 85% or more sequence identity with an activator (tracrRNA) molecule set forth in any one of SEQ ID NOs:431-562, and 1535-1544, or a complement thereof. In some cases, an activator (e.g., a trRNA, trRNA-like molecule, etc.) of a dual guide nucleic acid (e.g., a dual guide RNA) or a single guide nucleic acid (e.g., a single guide RNA) includes a stretch of nucleotides with 90% or more sequence identity with an activator (tracrRNA) molecule set forth in any one of SEQ ID NOs:431-562, and 1535-1544, or a complement thereof. In some cases, an activator (e.g., a trRNA, trRNA-like molecule, etc.) of a dual guide nucleic acid (e.g., a dual guide RNA) or a single guide nucleic acid (e.g., a single guide RNA) includes a stretch of nucleotides with 95% or more sequence identity with an activator (tracrRNA) molecule set forth in any one of SEQ ID NOs:431-562, and 1535-1544, or a complement thereof. In some cases, an activator (e.g., a trRNA, trRNA-like molecule, etc.) of a dual guide nucleic acid (e.g., a dual guide RNA) or a single guide nucleic acid (e.g., a single guide RNA) includes a stretch of nucleotides with 98% or more sequence identity with an activator (tracrRNA) molecule set forth in any one of SEQ ID NOs:431-562, and 1535-1544, or a complement thereof. In some cases, an activator (e.g., a trRNA, trRNA-like molecule, etc.) of a dual guide nucleic acid (e.g., a dual guide RNA) or a single guide nucleic acid (e.g., a single guide RNA) includes a stretch of nucleotides with 100% sequence identity with an activator (tracrRNA) molecule set forth in any one of SEQ ID NOs:431-562, and 1535-1544, or a complement thereof.

[0178] In some cases, an activator (e.g., a trRNA, trRNA-like molecule, etc.) of a dual guide nucleic acid (e.g., a dual guide RNA) or a single guide nucleic acid (e.g., a single guide RNA) includes 30 or more nucleotides (nt) (e.g., 40 or more, 50 or more, 60 or more, 70 or more, 75 or more nt). In some cases, an activator (e.g., a trRNA, trRNA-like molecule, etc.) of a dual guide nucleic acid (e.g., a dual guide RNA) or a single guide nucleic acid (e.g., a single guide RNA) has a length in a range of from 30 to 200 nucleotides (nt) (e.g., 40 to 200 nucleotides, 50 to 200 nucleotides, 60 to 200 nucleotides, 65 to 200 nucleotides, 70 to 200 nucleotides, 75 to 200 nucleotides, 40 to 150 nucleotides, 50 to 150 nucleotides, 60 to 150 nucleotides, 65 to 150 nucleotides, 70 to 150 nucleotides, 75 to 150 nucleotides, 40 to 100 nucleotides, 50 to 100 nucleotides, 60 to 100 nucleotides, 65 to 100 nucleotides, 70 to 100 nucleotides, or 75 to 100 nucleotides).

[0179] The protein-binding segment can have a length of from about 10 nucleotides to about 100 nucleotides. For example, the protein-binding segment can have a length of from about 15 nucleotides (nt) to about 80 nt, from about 15 nt to about 50 nt, from about 15 nt to about 40 nt, from about 15 nt to about 30 nt or from about 15 nt to about 25 nt.

[0180] Also with regard to both a subject single guide nucleic acid and to a subject dual guide nucleic acid, the dsRNA duplex of the protein-binding segment can have a length from about 6 base pairs (bp) to about 50 bp. For example, the dsRNA duplex of the protein-binding segment can have a length from about 6 bp to about 40 bp, from about 6 bp to about 30 bp, from about 6 bp to about 25 bp, from about 6 bp to about 20 bp, from about 6 bp to about 15 bp, from about 8 bp to about 40 bp, from about 8 bp to about 30 bp, from about 8 bp to about 25 bp, from about 8 bp to about 20 bp or from about 8 bp to about 15 bp. For example, the dsRNA duplex of the protein-binding segment can have a length from about from about 8 bp to about 10 bp, from about 10 bp to about 15 bp, from about 15 bp to about 18 bp, from about 18 bp to about 20 bp, from about 20 bp to about 25 bp, from about 25 bp to about 30 bp, from about 30 bp to about 35 bp, from about 35 bp to about 40 bp, or from about 40 bp to about 50 bp. In some embodiments, the dsRNA duplex of the protein-binding segment has a length of 36 base pairs. The percent complementarity between the nucleotide sequences that hybridize to form the dsRNA duplex of the protein-binding segment can be 60% or more. For example, the percent complementarity between the nucleotide sequences that hybridize to form the dsRNA duplex of the protein-binding segment can be 65% or more, 70% or more, 75% or more, 80% or more, 85% or more, 90% or more, 95% or more, 98% or more, or 99% or more. In some cases, the percent complementarity between the nucleotide sequences that hybridize to form the dsRNA duplex of the protein-binding segment is 100%.

[0181] Hybrid Guide Nucleic Acids

[0182] In some cases, a guide nucleic acid is two RNA molecules (dual guide RNA). In some cases, a guide nucleic acid is one RNA molecule (single guide RNA). In some cases, a guide nucleic acid is a DNA/RNA hybrid molecule. In such cases, the protein-binding segment of the guide nucleic acid is RNA and forms an RNA duplex. Thus, the duplex-forming segments of the activator and the targeter is RNA. However, the targeting segment of a guide nucleic acid can be DNA. Thus, if a DNA/RNA hybrid guide nucleic acid is a dual guide nucleic acid, the “targeter” molecule and be a hybrid molecule (e.g, the targeting segment can be DNA and the duplex-forming segment can be RNA). In such cases, the duplex-forming segment of the “activator” molecule can be RNA (e.g., in order to form an RNA-duplex with the duplex-forming segment of the targeter molecule), while nucleotides of the “activator” molecule that are outside of the duplex-forming segment can be DNA (in which case the activator molecule is a hybrid DNA/RNA molecule) or can be RNA (in which case the activator molecule is RNA). If a DNA/RNA hybrid guide nucleic acid is a single guide nucleic acid, then the targeting segment can be DNA, the duplex-forming segments (which make up the protein-binding segment of the single guide nucleic acid) can be RNA, and nucleotides outside of the targeting and duplex-forming segments can be RNA or DNA.

[0183] A DNA/RNA hybrid guide nucleic can be useful in some cases, for example, when a target nucleic acid is an RNA. Cas9 normally associates with a guide RNA that hybridizes with a target DNA, thus forming a DNA-RNA duplex at the target site. Therefore, when the target nucleic acid is an RNA, it is sometimes advantageous to recapitulate a DNA-RNA duplex at the target site by using a targeting segment (of the guide nucleic acid) that is DNA instead of RNA. However, because the protein-binding segment of a guide nucleic acid is an RNA-duplex, the targeter molecule is DNA in the targeting segment and RNA in the duplex-forming segment. Hybrid guide nucleic acids can bias Cas9 binding to single stranded target nucleic acids relative to double stranded target nucleic acids.

[0184] Exemplary Guide Nucleic Acids

[0185] In some embodiments, a suitable guide nucleic acid comprises two separate RNA polynucleotide molecules. In some cases, the first of the two separate RNA polynucleotide molecules (the activator) comprises a nucleotide sequence having 60% or more (e.g., 65% or more, 70% or more, 75% or more, 80% or more, 85% or more, 90% or more, 95% or more, 98% or more, 99% or more, or 100%) nucleotide sequence identity over a stretch of 8 or more contiguous nucleotides (e.g., 8 or more contiguous nucleotides, 10 or more contiguous nucleotides, 12 or more contiguous nucleotides, 15 or more contiguous nucleotides, or 20 or more contiguous nucleotides) to any one of the nucleotide sequences set forth in SEQ ID NOs:431-562, or a complement thereof. In some cases, the second of the two separate RNA polynucleotide molecules (the targeter) comprises a nucleotide sequence having 60% or more (e.g., 65% or more, 70% or more, 75% or more, 80% or more, 85% or more, 90% or more, 95% or more, 98% or more, 99% or more, or 100%) nucleotide sequence identity over a stretch of 8 or more contiguous nucleotides (e.g., 8 or more contiguous nucleotides, 10 or more contiguous nucleotides, 12 or more contiguous nucleotides, 15 or more contiguous nucleotides, or 20 or more contiguous nucleotides) to any one of the nucleotide sequences set forth in SEQ ID NOs:563-679, or a complement thereof.

[0186] In some embodiments, a suitable guide nucleic acid is a single RNA polynucleotide and comprises a first nucleotide sequence having 60% or more (e.g., 65% or more, 70% or more, 75% or more, 80% or more, 85% or more, 90% or more, 95% or more, 98% or more, 99% or more, or 100%) nucleotide sequence identity over a stretch of 8 or more contiguous nucleotides (e.g., 8 or more contiguous nucleotides, 10 or more contiguous nucleotides, 12 or more contiguous nucleotides, 15 or more contiguous nucleotides, or 20 or more contiguous nucleotides) to any one of the nucleotide sequences set forth in SEQ ID NOs:431-562 and a second nucleotide sequence having 60% or more (e.g., 65% or more, 70% or more, 75% or more, 80% or more, 85% or more, 90% or more, 95% or more, 98% or more, 99% or more, or 100%) nucleotide sequence identity over a stretch of 8 or more contiguous nucleotides (e.g., 8 or more contiguous nucleotides, 10 or more contiguous nucleotides, 12 or more contiguous nucleotides, 15 or more contiguous nucleotides, or 20 or more contiguous nucleotides) to any one of the nucleotide sequences set forth in SEQ ID NOs: 463-679.

[0187] In some embodiments, the guide nucleic acid is a dual guide nucleic acid and the targeter comprises the sequence 5′GUUUUAGAGCUA-3′ (SEQ ID NO:679) linked at its 5′ end to a stretch of nucleotides that are complementary to a target nucleic acid. In some embodiments, the guide nucleic acid is a dual guide nucleic acid and the activator comprises the sequence 5′ UAGCAAGUUAAAAUAAGGCUAGUCCG-3′ (SEQ ID NO:397).

[0188] In some embodiments, the guide nucleic acid is a single guide nucleic acid and comprises the sequence 5′-GUUUUAGAGCUA-linker-UAGCAAGUUAAAAUAAGGCUAGUCCG-3′ (SEQ ID NO:680) linked at its 5′ end to a stretch of nucleotides that are complementary to a target nucleic acid (where “linker” denotes any a linker nucleotide sequence that can comprise any nucleotide sequence). Other exemplary single guide nucleic acids include those set forth in SEQ ID NOs: 680-682.

[0189] Stability Control Sequence (e.g., Transcriptional Terminator Segment)

[0190] In some embodiments, a guide nucleic acid comprises a stability control sequence. A stability control sequence influences the stability of a nucleic acid (e.g., a guide nucleic acid, a targeter, an activator, etc.). One example of a suitable stability control sequence for use with an RNA is a transcriptional terminator segment (i.e., a transcription termination sequence). A transcriptional terminator segment of a subject guide nucleic acid can have a total length of from about 10 nucleotides to about 100 nucleotides, e.g., from about 10 nucleotides (nt) to about 20 nt, from about 20 nt to about 30 nt, from about 30 nt to about 40 nt, from about 40 nt to about 50 nt, from about 50 nt to about 60 nt, from about 60 nt to about 70 nt, from about 70 nt to about 80 nt, from about 80 nt to about 90 nt, or from about 90 nt to about 100 nt. For example, the transcriptional terminator segment can have a length of from about 15 nucleotides (nt) to about 80 nt, from about 15 nt to about 50 nt, from about 15 nt to about 40 nt, from about 15 nt to about 30 nt or from about 15 nt to about 25 nt.

[0191] In some cases, the transcription termination sequence is one that is functional in a eukaryotic cell. In some cases, the transcription termination sequence is one that is functional in a prokaryotic cell.

[0192] Non-limiting examples of nucleotide sequences that can be included in a stability control sequence (e.g., transcriptional termination segment, or in any segment of the guide nucleic acid to provide for increased stability) include sequences set forth in SEQ ID NO:683-696 and, for example,

(SEQ ID NO: 795)
5′-UAAUCCCACAGCCGCCAGUUCCGCUGGCGGCAUUUU-5′
(a Rho-independent trp termination site).

[0193] Additional Sequences

[0194] In some embodiments, a guide nucleic acid comprises an additional segment or segments (in some cases at the 5′ end, in some cases the 3′ end, in some cases at either the 5′ or 3′ end, in some cases embedded within the sequence (i.e., not at the 5′ and/or 3′ end), in some cases at both the 5′ end and the 3′ end, in some cases embedded and at the 5′ end and/or the 3′ end, etc). For example, a suitable additional segment can comprise a 5′ cap (e.g., a 7-methylguanylate cap (m⁷G)); a 3′ polyadenylated tail (i.e., a 3′ poly(A) tail); a ribozyme sequence (e.g. to allow for self-cleavage of a guide nucleic acid (or component of a guide nucleic acid, e.g., a targeter, an activator, etc.) and release of a mature PAMmer in a regulated fashion); a riboswitch sequence (e.g., to allow for regulated stability and/or regulated accessibility by proteins and protein complexes); a sequence that forms a dsRNA duplex (i.e., a hairpin)); a sequence that targets an RNA to a subcellular location (e.g., nucleus, mitochondria, chloroplasts, and the like); a modification or sequence that provides for tracking (e.g., a direct lable (e.g., direct conjugation to a fluorescent molecule (i.e., fluorescent dye)), conjugation to a moiety that facilitates fluorescent detection, a sequence that allows for fluorescent detection; a modification or sequence that provides a binding site for proteins (e.g., proteins that act on DNA, including transcriptional activators, transcriptional repressors, DNA methyltransferases, DNA demethylases, histone acetyltransferases, histone deacetylases, proteins that bind RNA (e.g., RNA aptamers), labeled proteins, fluorescently labeled proteins, and the like); a modification or sequence that provides for increased, decreased, and/or controllable stability; and combinations thereof.

[0195] PAMmer

[0196] The present disclosure provides a PAMmer. A subject PAMmer is a single stranded oligonucleotide (as defined above) (e.g., DNA, RNA, a modified nucleic acid (described below), etc.) that hybridizes to a single stranded target nucleic acid (thus converting the single stranded target nucleic acid into a double stranded target nucleic acid at a desired position), and provides a protospacer adjacent motif (PAM) sequence, thus converting the single stranded target nucleic acid into a target for binding and/or cleavage by a Cas9 polypeptide.

[0197] In some cases, a PAMmer is a DNA molecule. In some cases, a PAMmer is an RNA molecule. In some cases, a PAMmer is a hybrid DNA/RNA molecule (e.g., in some cases, at least the PAM sequence of the PAMmer is DNA). In some cases the PAMmer has one or more modified nucleic acids (described in more detail below with respect to nucleic acid modifications). In some embodiments, a subject PAMmer has one or more nucleotides that are 2′-O-Methyl modified nucleotides. In some embodiments, a subject PAMmer has one or more 2′ Fluoro modified nucleotides. In some embodiments, a subject PAMmer has one or more LNA bases. In some embodiments, a subject PAMmer has one or more nucleotides that are linked by a phosphorothioate bond (i.e., the subject nucleic acid has one or more phosphorothioate linkages). In some embodiments, a subject PAMmer has a 5′ cap (e.g., a 7-methylguanylate cap (m7G)). In some embodiments, a subject PAMmer has a combination of modified nucleotides. For example, a subject PAMmer can have a 5′ cap (e.g., a 7-methylguanylate cap (m7G)) in addition to having one or more nucleotides with other modifications (e.g., a 2′-O-Methyl nucleotide and/or a 2′ Fluoro modified nucleotide and/or a LNA base and/or a phosphorothioate linkage). See FIG. 17 for working examples that utilize PAMmers having one or more modified nucleotides.

[0198] A PAMmer includes a PAM sequence and at least one of: an orientation segment (which is positioned 3′ of the PAM sequence), and a specificity segment (which is positioned 5′ of the PAM sequence). A specificity segment has a nucleotide sequence that is complementary to a first target nucleotide sequence in a target nucleic acid (i.e., the sequence that is targeted by the specificity segment), where the first target nucleotide sequence overlaps (in some cases 100%) with the sequence targeted by the targeting segment of the guide nucleic acid. In other words, the specificity segment is complementary with (and hybridizes to) the target site of the target nucleic acid (see FIGS. 8A-D). In some cases, a PAMmer having a specificity segment is referred to herein as a “5′ extended PAMmer.” An orientation segment has a nucleotide sequence that is complementary to a second target nucleotide sequence in a target nucleic acid (i.e., the sequence that is targeted by the orientation segment). In some cases, a subject PAMmer includes a PAM sequence and an orientation segment, but does not include a specificity segment. In some cases, a subject PAMmer includes a PAM sequence and a specificity segment, but does not include an orientation segment.

[0199] In some cases, a subject PAMmer includes a PAM sequence, an orientation segment, and a specificity segment. The number of nucleotides (nt) present in the PAMmer between a specificity segment and an orientation segment can depend on a number of factors that include, but are not limited to: the length of the PAM sequence (which is present between the specificity segment and the orientation segment); the number of nucleotides present between the target site and the orientation site of the target nucleic acid; the presence or absence of additional sequences (e.g., aptamers, protein binding sequences, linker nucleotides, stability sequences, etc.) between the specificity segment and the orientation segment; etc. In some embodiments, the number of nucleotides (nt) present in the PAMmer between a specificity segment and an orientation segment is in a range of from 2 nt to 100 nt (e.g., 2 nt to 90 nt, 2 nt to 80 nt, 2 nt to 70 nt, 2 nt to 60 nt, 2 nt to 50 nt, 2 nt to 40 nt, 2 nt to 30 nt, 2 nt to 25 nt, 2 nt to 20 nt, 2 nt to 15 nt, or 2 nt to 10 nt). In some embodiments, the number of nucleotides (nt) present in the PAMmer between the specificity segment and the orientation segment is 100 nt or less (e.g., 90 nt or less, 80 nt or less, 70 nt or less, 60 nt or less, 50 nt or less, 40 nt or less, 30 nt or less, 25 nt or less, 25 nt or less, 20 nt or less, 15 nt or less, or 10 nt or less).

[0200] In some embodiments, the PAM sequence is immediately adjacent to the orientation segment, immediately adjacent to the specificity segment, and/or immediately adjacent to both the orientation segment and the specificity segment. In some embodiments, the number of nucleotides (nt) present in the PAMmer between the PAM sequence and the specificity segment of the PAMmer is in a range of from 0 nt to 10 nt (e.g., 0 nt to 9 nt, 0 nt to 8 nt, 0 nt to 7 nt, 0 nt to 6 nt, 0 nt to 5 nt, 0 nt to 4 nt, 0 nt to 3 nt, 1 nt to 9 nt, 1 nt to 8 nt, 1 nt to 7 nt, 1 nt to 6 nt, 1 nt to 5 nt, 1 nt to 4 nt, 1 nt to 3 nt, 2 nt to 9 nt, 2 nt to 8 nt, 2 nt to 7 nt, 2 nt to 6 nt, 2 nt to 5 nt, 2 nt to 4 nt, or 2 nt to 3 nt). In some embodiments, 10 or less nt (e.g., 9 or less nt, 8 or less nt, 7 or less nt, 6 or less nt, 5 or less nt, 4 or less nt, 3 or less nt, 2 or less nt, 1 or less nt, or no nt) are present in the PAMmer between the PAM sequence and the specificity segment. In some embodiments, the number of nucleotides (nt) present in the PAMmer between the PAM sequence and the orientation segment of the PAMmer is in a range of from 0 nt to 10 nt (e.g., 0 nt to 9 nt, 0 nt to 8 nt, 0 nt to 7 nt, 0 nt to 6 nt, 0 nt to 5 nt, 0 nt to 4 nt, 0 nt to 3 nt, 1 nt to 9 nt, 1 nt to 8 nt, 1 nt to 7 nt, 1 nt to 6 nt, 1 nt to 5 nt, 1 nt to 4 nt, 1 nt to 3 nt, 2 nt to 9 nt, 2 nt to 8 nt, 2 nt to 7 nt, 2 nt to 6 nt, 2 nt to 5 nt, 2 nt to 4 nt, or 2 nt to 3 nt). In some embodiments, 10 or less nt (e.g., 9 or less nt, 8 or less nt, 7 or less nt, 6 or less nt, 5 or less nt, 4 or less nt, 3 or less nt, 2 or less nt, 1 or less nt, or no nt) are present in the PAMmer between the PAM sequence and the orientation segment.

[0201] In some embodiments, a PAMmer has a length (e.g., the PAM sequence and the orientation segment have a combined length) in a range of from 2 nt to 100 nt (e.g., 2 nt to 70 nt, 2 nt to 50 nt, 2 nt to 45 nt, 2 nt to 40 nt, 2 nt to 35 nt, 2 nt to 30 nt, 2 nt to 25 nt, 2 nt to 20 nt, 2 nt to 10 nt, 2 nt to 5 nt, 3 nt to 70 nt, 3 nt to 50 nt, 3 nt to 45 nt, 3 nt to 40 nt, 3 nt to 35 nt, 3 nt to 30 nt, 3 nt to 25 nt, 3 nt to 20 nt, 3 nt to 10 nt, 3 nt to 5 nt, 5 nt to 70 nt, 5 nt to 50 nt, 5 nt to 45 nt, 5 nt to 40 nt, 5 nt to 35 nt, 5 nt to 30 nt, 5 nt to 25 nt, 5 nt to 20 nt, 10 nt to 70 nt, 10 nt to 50 nt, 10 nt to 45 nt, 10 nt to 40 nt, 10 nt to 35 nt, 10 nt to 30 nt, 10 nt to 25 nt, 10 nt to 20 nt, 10 nt to 15 nt, 15 nt to 70 nt, 15 nt to 50 nt, 15 nt to 45 nt, 15 nt to 40 nt, 15 nt to 35 nt, 15 nt to 30 nt, 15 nt to 25 nt, or 15 nt to 20 nt).

[0202] PAM Sequence

[0203] A wild type Cas9 polypeptide normally has nuclease activity that cleaves a target nucleic acid (e.g., a double stranded DNA (dsDNA)) at a target site defined by the region of complementarity between the targeting segment of the guide nucleic acid and the target nucleic acid. In some cases, site-specific cleavage of the target nucleic acid occurs at locations determined by both (i) base-pairing complementarity between the guide nucleic acid and the target nucleic acid; and (ii) a short motif referred to as the protospacer adjacent motif (PAM) in the target nucleic acid. When a Cas9 polypeptide binds to (in some cases cleaves) a dsDNA target nucleic acid, the PAM sequence that is recognized (bound) by the Cas9 polypeptide is present on the non-complementary strand (the strand that does not hybridize with the targeting segment of the guide nucleic acid) of the target DNA. Thus, when a Cas9 Polypeptide binds to (in some cases cleaves) a single stranded target nucleic acid, no PAM sequence is present because there is no non-complementary strand (see FIG. 8). A subject PAMmer provides a PAM sequence, which is positioned near the target site (the sequence targeted by the targeting segment of the guide nucleic acid) by the orientation segment and/or the specificity segment of the PAMmer.

[0204] In some embodiments, the PAM sequence of the PAMmer is complementary to (i.e., hybridizes with) the target nucleic acid (FIG. 1, FIG. 4A). In some embodiments, the PAM sequence of the PAMmer is not complementary to (i.e., does not hybridize with) the target nucleic acid (FIG. 2B, FIG. 6). In some embodiments, a PAM sequence of a PAMmer has a length in a range of from 1 nt to 15 nt (e.g., 1 nt to 14 nt, 1 nt to 13 nt, 1 nt to 12 nt, 1 nt to 11 nt, 1 nt to 10 nt, 1 nt to 9 nt, 1 nt to 9 nt, 1 nt to 8 nt, 1 nt to 7 nt, 1 nt to 6 nt, 1 nt to 5 nt, 1 nt to 4 nt, 1 nt to 3 nt, 2 nt to 15 nt, 2 nt to 14 nt, 2 nt to 13 nt, 2 nt to 12 nt, 2 nt to 11 nt, 2 nt to 10 nt, 2 nt to 9 nt, 2 nt to 8 nt, 2 nt to 7 nt, 2 nt to 6 nt, 2 nt to 5 nt, 2 nt to 4 nt, 2 nt to 3 nt, 2 nt, or 3 nt).

[0205] In some embodiments (e.g., when the Cas9 polypeptide from S. pyogenes or a closely related Cas9 is used; see for example, Chylinski et al., RNA Biol. 2013 May; 10(5):726-37; and Jinek et al., Science. 2012 Aug. 17; 337(6096):816-21; both of which are hereby incorporated by reference in their entirety), the PAM sequence of the PAMmer can be GG (5′-GG-3′), or can be 5′-NGG-3′, where N is any nucleotide. In some embodiments (e.g., when a Cas9 polypeptide from Neisseria meningitidis or a closely related Cas9 is used), the PAM sequence of the PAMmer can be 5′-NNNNGANN-3′, 5′-NNNNGTTN-3′, 5′-NNNNGNNT-3′, 5′-NNNNGTNN-3′, 5′-NNNNGNTN-3′, or 5′-NNNNGATT-3′, where N is any nucleotide. In some embodiments (e.g., when a Cas9 polypeptide from Streptococcus thermophilus #1 or a closely related Cas9 is used), the PAM sequence of the PAMmer can be 5′-NNAGAA-3′, 5′-NNAGGA-3′, 5′-NNGGAA-3′, 5′-NNANAA-3′, or 5′-NNGGGA-3′ where N is any nucleotide. In some embodiments (e.g., when a Cas9 polypeptide from Treponema denticola (TD) or a closely related Cas9 is used), the PAM sequence of the PAMmer can be 5′-NAAAAN-3′, 5′-NAAAAC-3′, 5′-NAAANC-3′, 5′-NANAAC-3′, or 5′-NNAAAC-3′, where N is any nucleotide. As would be known by one of ordinary skill in the art, additional PAM sequences for other Cas9 polypeptides can readily be determined using bioinformatic analysis (e.g, analysis of genomic sequencing data). See Esvelt et al., Nat Methods. 2013 November; 10(11):1116-21, for additional information.

[0206] Specificity Segment

[0207] A specificity segment can be present or absent in a subject PAMmer (the PAMmer has a specificity segment, an orientation segment, or both a specificity segment and an orientation segment), and when present, the specificity segment is positioned 5′ of the PAM sequence. In some cases, a PAMmer having a specificity segment is referred to herein as a “5′-extended PAMmer.” The specificity segment hybridizes to (i.e., targets) a sequence of a target nucleic that overlaps with the target site such that the PAM sequence is positioned near the target site (i.e., the sequence of the target nucleic acid that is targeted by the targeting segment of the guide nucleic acid). Thus, the PAMmer provides a PAM sequence at any desired location within a target nucleic acid (e.g., by designing the specificity segment of the PAMmer to hybridize to any desired nucleotide sequence of the target nucleic acid).

[0208] In cases where a PAMmer is used in a method of cleavage, the targeting segment of the guide nucleic acid (which associates with a Cas9 polypeptide) is complementary to the target nucleic acid, and this is true whether or not the PAMmer has a specificity segment. In cases where a PAMmer is used in a method of binding, the targeting segment of the guide nucleic acid (which associates with a Cas9 polypeptide) is complementary to the target nucleic acid when the PAMmer has a specificity segment, but the targeting segment of the guide nucleic acid need not be complementary to the target nucleic acid when the PAMmer does not have a specificity segment (i.e., when the PAMmer has PAM sequence and an orientation segment, but not a specificity segment).

[0209] A specificity segment can have a length of from 3 nucleotides (nt) to 100 nt (e.g., from 3 nt to 80 nt, from 3 nt to 50 nt, from 3 nt to 40 nt, from 5 nt to 40 nt, from 5 nt to 35 nt, from 5 nt to 30 nt, from 5 nt to 25 nt, from 10 nt to 40 nt, from 10 nt to 35 nt, from 10 nt to 30 nt, from 10 nt to 25 nt, from 10 nt to 20 nt, from 12 nt to 40 nt, from 12 nt to 35 nt, from 12 nt to 30 nt, from 12 nt to 25 nt, from 12 nt to 20 nt, from 15 nt to 40 nt, from 15 nt to 35 nt, from 15 nt to 30 nt, from 15 nt to 25 nt, from 15 nt to 20 nt, from 17 nt to 40 nt, from 17 nt to 35 nt, from 17 nt to 30 nt, from 17 nt to 25 nt, from 17 nt to 20 nt, from 18 nt to 40 nt, from 18 nt to 35 nt, from 18 nt to 30 nt, from 18 nt to 25 nt, from 18 nt to 20 nt, from 20 nt to 40 nt, from 20 nt to 35 nt, from 20 nt to 30 nt, or from 20 nt to 25 nt). In some cases, the specificity segment is 20 nucleotides in length. In some cases, the specificity segment is 19 nucleotides in length.

[0210] The percent complementarity between the specificity segment and the sequence of the target nucleic acid targeted by the specificity segment (e.g., the target site, i.e., the site targeted by the targeting segment of the guide nucleic acid) can be 60% or more (e.g., 65% or more, 70% or more, 75% or more, 80% or more, 85% or more, 90% or more, 95% or more, 97% or more, 98% or more, 99% or more, or 100%). In some cases, the percent complementarity between the specificity segment and the sequence of the target nucleic acid targeted by the specificity segment is 60% or more (e.g., 65% or more, 70% or more, 75% or more, 80% or more, 85% or more, 90% or more, 95% or more, 97% or more, 98% or more, 99% or more, or 100%) over about 10 to 30 contiguous nucleotides (nt) (e.g. 15 to 30 contiguous nt, 15 to 25 contiguous nt, 17 to 30 contiguous t, 17 to 25 contiguous t, or 18 to 22 contiguous nt). In some cases, the percent complementarity between the specificity segment and the sequence of the target nucleic acid targeted by the specificity segment is 60% or more (e.g., 65% or more, 70% or more, 75% or more, 80% or more, 85% or more, 90% or more, 95% or more, 97% or more, 98% or more, 99% or more, or 100%) over 10 or more contiguous nucleotides (nt) (e.g. 12 or more contiguous nt, 15 or more contiguous nt, 17 or more contiguous nt, 18 or more contiguous nt, 19 or more contiguous nt, or 20 or more contiguous nt).

[0211] In some cases, the sequence targeted by the specificity segment of a PAMmer is 100% identical to the target site (i.e., the sequence targeted by the targeting segment of the guide nucleic acid). However, the sequence targeted by the specificity segment of a PAMmer need not be 100% identical to the target site. For example, in some cases, the sequence targeted by the specificity segment of a PAMmer overlaps with the sequence targeted by the targeting segment of the guide nucleic acid, but the overlap is not 100%. For example, the sequence targeted by the specificity segment of a PAMmer can be a subset of the target site. In some cases, the sequence targeted by the specificity segment of a PAMmer is shorter than the sequence targeted by the targeting segment of the guide nucleic acid. In some cases, the sequence targeted by the specificity segment of a PAMmer is longer than the sequence targeted by the targeting segment of the guide nucleic acid. In some cases, the sequence targeted by the specificity segment of a PAMmer is the same length as the sequence targeted by the targeting segment of the guide nucleic acid.

[0212] In some cases, the sequence targeted by the specificity segment of a PAMmer shares 2 nucleotides (nt) or more with the sequence targeted by the targeting segment of the guide nucleic acid (e.g., 3 nt or more, 5 nt or more, 8 nt or more, 10 nt or more, 12 nt or more, 15 nt or more, 18 nt or more, etc.). In some cases, the sequence targeted by the specificity segment of a PAMmer shares 2 nucleotides (nt) to 30 nt with the sequence targeted by the targeting segment of the guide nucleic acid (e.g., 5 nt to 30 nt, 5 nt to 25 nt, 5 nt to 22 nt, 8 nt to 30 nt, 8 nt to 25 nt, 8 nt to 22 nt, 8 nt to 20 nt, 10 nt to 30 nt, 10 nt to 25 nt, 10 nt to 22 nt, 10 nt to 20 nt, 12 nt to 30 nt, 12 nt to 25 nt, 12 nt to 22 nt, 12 nt to 20 nt, 15 nt to 30 nt, 15 nt to 25 nt, 15 nt to 22 nt, 15 nt to 20 nt, 18 nt to 30 nt, 18 nt to 25 nt, 18 nt to 22 nt, or 18 nt to 20 nt).

[0213] In some embodiments, a PAMmer has a specificity segment, but does not have an orientation segment (i.e., the PAMmer does not have a nucleotide sequence 3′ of the PAM sequence that hybridizes with the target nucleic acid) (FIG. 8E). In some such cases, the PAM sequence can be at the 3′ end of the PAMmer (i.e., the PAMmer can have 0 nucleotides 3′ of the PAM sequence), or the PAMmer can have 1 or more nucleotides (nt) 3′ of the PAM sequence (e.g., 2 or more nt, 3 or more nt, 4 or more nt, 5 or more nt, 10 or more nt, 15 or more nt, 20 or more nt, etc.), where the nucleotides 3′ of the PAM sequence do not hybridize to the target nucleic acid. In some cases in which a PAMmer does not have an orientation segment, a PAMmer can have a nucleotide sequence, 3′ of the PAM sequence, with a length in a range of from 1 nucleotide (nt) to 20 nt (e.g., from 1 nt to 18 nt, from 1 nt to 16 nt, from 1 nt to 14 nt, from 1 nt to 12 nt, from 1 nt to 10 nt, from 1 nt to 9 nt, from 1 nt to 8 nt, from 1 nt to 7 nt, from 1 nt to 6 nt, from 1 nt to 5 nt, from 1 nt to 4 nt, or from 1 nt to 3 nt), where the nucleotides 3′ of the PAM sequence do not hybridize to the target nucleic acid. For example, if a PAMmer has nucleotides 3′ of the PAM sequence that do hybridize to the target nucleic acid, then the nucleotides that hybridize would be considered an (or part of an) orientation segment.

[0214] In some cases, the length of the specificity segment inversely correlates with efficiency of the cleavage reaction and positively correlates with specificity (i.e., reduction of off-target effects). Thus, there can be a trade-off between the desired level of cleavage and the desired level of specificity. The presence (as well as the length) of a specificity segment can be determined based on the particular target nucleic acid, the nature/purpose of the method, and/or the desired outcome. For example, if maximum specificity is desired, but cleavage efficiency is not a concern, then a long specificity segment may be desirable. On the other hand, if maximum cleavage is desired, but specificity is not a concern (e.g., the orientation segment of the PAMmer provides for adequate specificity), then a shorter specificity segment (e.g., no specificity segment) may be desirable.

[0215] For methods of binding, the presence of a specificity segment can increase binding specificity. Not to be bound by theory, it is believed that this is because the specificity segment provides an energetic barrier to binding that can be overcome by the presence of a targeting segment in the guide nucleic acid that has complementarity to (i.e., can hybridize with) that target nucleic acid, thus displacing the specificity segment of the PAMmer.

[0216] Orientation Segment

[0217] An orientation segment can be present or absent in a subject PAMmer (the PAMmer has a specificity segment, an orientation segment, or both a specificity segment and an orientation segment), and when present, the orientation segment is positioned 3′ of the PAM sequence. The orientation segment hybridizes to (i.e., targets) a sequence of a target nucleic (the orientation site) such that the PAM sequence is positioned near the target site (i.e., the sequence of the target nucleic acid that is targeted by the targeting segment of the guide nucleic acid). Thus, the PAMmer provides a PAM sequence at any desired location within a target nucleic acid (e.g., by designing the orientation segment of the PAMmer to hybridize to any desired nucleotide sequence of the target nucleic acid).

[0218] The orientation segment can have a length of from 3 nucleotides (nt) to 100 nt (e.g., from 3 nt to 80 nt, from 3 nt to 50 nt, from 3 nt to 40 nt, from 5 nt to 40 nt, from 5 nt to 35 nt, from 5 nt to 30 nt, from 5 nt to 25 nt, from 10 nt to 40 nt, from 10 nt to 35 nt, from 10 nt to 30 nt, from 10 nt to 25 nt, from 10 nt to 20 nt, from 12 nt to 40 nt, from 12 nt to 35 nt, from 12 nt to 30 nt, from 12 nt to 25 nt, from 12 nt to 20 nt, from 15 nt to 40 nt, from 15 nt to 35 nt, from 15 nt to 30 nt, from 15 nt to 25 nt, from 15 nt to 20 nt, from 17 nt to 40 nt, from 17 nt to 35 nt, from 17 nt to 30 nt, from 17 nt to 25 nt, from 17 nt to 20 nt, from 18 nt to 40 nt, from 18 nt to 35 nt, from 18 nt to 30 nt, from 18 nt to 25 nt, from 18 nt to 20 nt, from 20 nt to 40 nt, from 20 nt to 35 nt, from 20 nt to 30 nt, or from 20 nt to 25 nt). In some cases, the orientation segment is 20 nucleotides in length. In some cases, the orientation segment is 19 nucleotides in length.

[0219] The percent complementarity between the orientation segment and the sequence of the target nucleic acid targeted by the orientation segment can be 60% or more (e.g., 65% or more, 70% or more, 75% or more, 80% or more, 85% or more, 90% or more, 95% or more, 97% or more, 98% or more, 99% or more, or 100%). In some cases, the percent complementarity between the orientation segment and the sequence of the target nucleic acid targeted by the orientation segment is 60% or more (e.g., 65% or more, 70% or more, 75% or more, 80% or more, 85% or more, 90% or more, 95% or more, 97% or more, 98% or more, 99% or more, or 100%) over about 10 to 30 contiguous nucleotides (nt) (e.g. 15 to 30 contiguous nt, 15 to 25 contiguous nt, 17 to 30 contiguous nt, 17 to 25 contiguous nt, or 18 to 22 contiguous nt). In some cases, the percent complementarity between the orientation segment and the sequence of the target nucleic acid targeted by the orientation segment is 60% or more (e.g., 65% or more, 70% or more, 75% or more, 80% or more, 85% or more, 90% or more, 95% or more, 97% or more, 98% or more, 99% or more, or 100%) over 10 or more contiguous nucleotides (nt) (e.g. 12 or more contiguous nt, 15 or more contiguous nt, 17 or more contiguous nt, 18 or more contiguous nt, 19 or more contiguous nt, or 20 or more contiguous nt).

[0220] In some cases, the sequence targeted by the orientation segment of a PAMmer is immediately adjacent to the sequence targeted by the targeting segment of the guide nucleic acid. In some embodiments, 10 or less nt (e.g., 9 or less nt, 8 or less nt, 7 or less nt, 6 or less nt, 5 or less nt, 4 or less nt, 3 or less nt, 2 or less nt, 1 or less nt, or no nt) are present in the target nucleic acid between the sequence targeted by the targeting segment of the guide nucleic acid (i.e., the target site) and the sequence targeted by the orientation segment of the PAMmer. In some cases, the sequence of the target nucleic acid that is targeted by the orientation segment of a PAMmer is within 10 or fewer nucleotides (nt) (e.g., 9 or fewer nt, 8 or fewer nt, 7 or fewer nt, 6 or fewer nt, 5 or fewer nt, 4 or fewer nt, 3 or fewer nt, 2 or fewer nt, 1 or fewer nt, or no nt) of the sequence targeted by the targeting segment of the guide nucleic acid. In some embodiments, the number of nucleotides (nt) present in the target nucleic acid between the sequence targeted by the targeting segment of the guide nucleic acid (i.e., the target site) and the sequence targeted by the orientation segment of the PAMmer is in a range of from 0 nt to 10 nt (e.g., 0 nt to 9 nt, 0 nt to 8 nt, 0 nt to 7 nt, 0 nt to 6 nt, 0 nt to 5 nt, 0 nt to 4 nt, 0 nt to 3 nt, 1 nt to 9 nt, 1 nt to 8 nt, 1 nt to 7 nt, 1 nt to 6 nt, 1 nt to 5 nt, 1 nt to 4 nt, 1 nt to 3 nt, 2 nt to 9 nt, 2 nt to 8 nt, 2 nt to 7 nt, 2 nt to 6 nt, 2 nt to 5 nt, 2 nt to 4 nt, or 2 nt to 3 nt).

[0221] In some cases, a PAMmer has an orientation segment, but does not have a specificity segment (i.e., the PAMmer does not have a nucleotide sequence 5′ of the PAM sequence that hybridizes with the target nucleic acid), but does have an orientation segment (FIG. 8F). In some such cases, the PAM sequence can be at the 5′ end of the PAMmer (i.e., the PAMmer can have 0 nucleotides 5′ of the PAM sequence), or the PAMmer can have 1 or more nucleotides (nt) 5′ of the PAM sequence (e.g., 2 or more nt, 3 or more nt, 4 or more nt, 5 or more nt, 10 or more nt, 15 or more nt, 20 or more nt, etc.), where the nucleotides 5′ of the PAM sequence do not hybridize to the target nucleic acid. In some cases in which a PAMmer does not have a specificity segment, a PAMmer can have a nucleotide sequence, 5′ of the PAM sequence, with a length in a range of from 1 nucleotide (nt) to 20 nt (e.g., from 1 nt to 18 nt, from 1 nt to 16 nt, from 1 nt to 14 nt, from 1 nt to 12 nt, from 1 nt to 10 nt, from 1 nt to 9 nt, from 1 nt to 8 nt, from 1 nt to 7 nt, from 1 nt to 6 nt, from 1 nt to 5 nt, from 1 nt to 4 nt, or from 1 nt to 3 nt), where the nucleotides 5′ of the PAM sequence do not hybridize to the target nucleic acid. For example, if a PAMmer has nucleotides 5′ of the PAM sequence that do hybridize to the target nucleic acid, then the nucleotides that hybridize would be considered a (or part of a) specificity segment.

[0222] In some cases (e.g., those involving methods of binding, where the PAMmer does not have a specificity segment), the target site of the target nucleic acid can be determined by the orientation segment of the PAMmer and not by the targeting segment of the guide nucleic acid. In some cases, the targeting segment of the guide nucleic acid does not have complementarity to a nucleotide sequence of the target nucleic acid. In some cases, the targeting segment of the guide nucleic acid does not have complementarity to a nucleotide sequence of the target nucleic acid that is near (e.g., within 20 or fewer nucleotides (nt), within 30 or fewer nt, within 40 or fewer t, within 50 or fewer nt, within 60 or fewer nt, within 70 or fewer nt, within 80 or fewer nt, within 90 or fewer nt, or within 100 or fewer nt) the orientation site. However, the orientation segment of the PAMmer still positions the PAM sequence of the PAMmer such that the target nucleic acid can still be bound and/or cleaved by a subject Cas9 polypeptide (e.g, see FIG. 5).

[0223] Stability Control Sequence (e.g., Transcriptional Terminator Segment)

[0224] In some embodiments, a PAMmer comprises a stability control sequence. A stability control sequence influences the stability of a nucleic acid (e.g., a guide nucleic acid, a targeter, an activator, a PAMmer etc.). One example of a suitable stability control sequence for use with an RNA is a transcriptional terminator segment (i.e., a transcription termination sequence). A transcriptional terminator segment of a subject guide nucleic acid can have a total length of from about 10 nucleotides to about 100 nucleotides, e.g., from about 10 nucleotides (nt) to about 20 nt, from about 20 nt to about 30 nt, from about 30 nt to about 40 nt, from about 40 nt to about 50 nt, from about 50 nt to about 60 nt, from about 60 nt to about 70 nt, from about 70 nt to about 80 nt, from about 80 nt to about 90 nt, or from about 90 nt to about 100 nt. For example, the transcriptional terminator segment can have a length of from about 15 nucleotides (nt) to about 80 nt, from about 15 nt to about 50 nt, from about 15 nt to about 40 nt, from about 15 nt to about 30 nt or from about 15 nt to about 25 nt.

[0225] In some cases, the transcription termination sequence is one that is functional in a eukaryotic cell. In some cases, the transcription termination sequence is one that is functional in a prokaryotic cell.

[0226] Non-limiting examples of nucleotide sequences that can be included in a stability control sequence (e.g., transcriptional termination segment, or in any segment of the guide nucleic acid to provide for increased stability) include sequences set forth in SEQ ID NO:683-696 and, for example,

(SEQ ID NO: 795)
5′-UAAUCCCACAGCCGCCAGUUCCGCUGGCGGCAUUUU-5′
(a Rho-independent trp termination site).

[0227] Additional Sequences

[0228] In some embodiments, a PAMmer comprises an additional segment or segments (in some cases at the 5′ end, in some cases the 3′ end, in some cases at either the 5′ or 3′ end, in some cases embedded within the sequence (i.e., not at the 5′ and/or 3′ end), in some cases at both the 5′ end and the 3′ end, in some cases embedded and at the 5′ end and/or the 3′ end, etc). For example, a suitable additional segment can comprise a 5′ cap (e.g., a 7-methylguanylate cap (m⁷G)); a 3′ polyadenylated tail (i.e., a 3′ poly(A) tail); a ribozyme sequence (e.g. to allow for self-cleavage of a precursor PAMmer and release of a mature PAMmer in a regulated fashion); a riboswitch sequence (e.g., to allow for regulated stability and/or regulated accessibility by proteins and protein complexes); a sequence that forms a dsRNA duplex (i.e., a hairpin)); a sequence that targets an RNA to a subcellular location (e.g., nucleus, mitochondria, chloroplasts, and the like); a modification or sequence that provides for tracking (e.g., direct conjugation to a fluorescent molecule (i.e., fluorescent dye), conjugation to a moiety that facilitates fluorescent detection, a sequence that allows for fluorescent detection, etc.); a modification or sequence that provides a binding site for proteins (e.g., proteins that act on DNA, including transcriptional activators, transcriptional repressors, DNA methyltransferases, DNA demethylases, histone acetyltransferases, histone deacetylases, proteins that bind RNA (e.g., RNA aptamers), labeled proteins, fluorescently labeled proteins, protein translation components (e.g., initiation factors, elongation factors release factors, etc.), RNA editing enzymes (e.g., RNA deaminases, e.g., adenosine deaminase acting on RNA (ADAR), including A to I and/or C to U editing enzymes), RNA splicing factors (e.g., RS domains), RNA and/or DNA helicases, RNA methylases, RNA-binding proteins, and the like); a modification or sequence that provides for increased, decreased, and/or controllable stability; and combinations thereof.

### Cas9 Polypeptides

[0229] A subject guide nucleic acid and a subject Cas9 polypeptide form a complex. The guide nucleic acid provides target specificity to the complex by comprising a nucleotide sequence that is complementary to a sequence (the target site) of a target nucleic acid (as noted above). The Cas9 polypeptide of the complex provides the site-specific activity. In other words, the Cas9 polypeptide is guided to a target site within a target nucleic acid sequence (e.g. a chromosomal sequence or an extrachromosomal sequence, e.g. an episomal sequence, a minicircle sequence, a mitochondrial sequence, a chloroplast sequence, etc.) by virtue of its association with the protein-binding segment of the guide nucleic acid (described above).

[0230] A subject Cas9 polypeptide can bind and/or modify (e.g., cleave, methylate, demethylate, etc.) a target nucleic acid and/or a polypeptide associated with target nucleic acid (e.g., methylation or acetylation of a histone tail). A Cas9 polypeptide is also referred to herein as a “site-directed polypeptide.”

[0231] In some cases, the Cas9 polypeptide is a naturally-occurring polypeptide (e.g, naturally occurs in bacterial and/or archaeal cells). In other cases, the Cas9 polypeptide is not a naturally-occurring polypeptide (e.g., the Cas9 polypeptide is a variant Cas9 polypeptide, a chimeric polypeptide as discussed below, and the like).

[0232] Exemplary Cas9 polypeptides are set forth in SEQ ID NOs: 1-259, and 795-1346 as a non-limiting and non-exhaustive list of Cas9 endonucleases. Naturally occurring Cas9 polypeptides bind a guide nucleic acid, are thereby directed to a specific sequence within a target nucleic acid (a target site), and cleave the target nucleic acid (e.g., cleave dsDNA to generate a double strand break, cleave ssDNA, cleave ssRNA, etc.). A subject Cas9 polypeptide comprises two portions, an RNA-binding portion and an activity portion. An RNA-binding portion interacts with a subject guide nucleic acid. An activity portion exhibits site-directed enzymatic activity (e.g., nuclease activity, activity for DNA and/or RNA methylation, activity for DNA and/or RNA cleavage, activity for histone acetylation, activity for histone methylation, activity for RNA modification, activity for RNA-binding, activity for RNA splicing etc.). In some cases the activity portion exhibits reduced nuclease activity relative to the corresponding portion of a wild type Cas9 polypeptide. In some cases, the activity portion is enzymatically inactive.

[0233] Assays to determine whether a protein has an RNA-binding portion interacts with a subject guide nucleic acid can be any convenient binding assay that tests for binding between a protein and a nucleic acid. Exemplary binding assays are shown in FIG. 1 and FIG. 2 and include binding assays (e.g., gel shift assays) that include adding a guide nucleic acid and a Cas9 polypeptide to a target nucleic acid. In some cases, a PAMmer is also added (e.g., in some cases when the target nucleic acid is a single stranded nucleic acid).

[0234] Assays to determine whether a protein has an activity portion (e.g., to determine if the polypeptide has nuclease activity that cleave a target nucleic acid) can be any convenient nucleic acid cleavage assay that tests for nucleic acid cleavage. Exemplary cleavage assays are shown in FIG. 3, FIG. 4, FIG. 5, FIG. 6, and FIG. 7 and include cleavage assays that include adding a guide nucleic acid and a Cas9 polypeptide to a target nucleic acid. In some cases, a PAMmer is also added (e.g., in some cases when the target nucleic acid is a single stranded nucleic acid).

[0235] In some cases, a subject Cas9 polypeptide (e.g., a chimeric Cas9 polypeptide) has enzymatic activity that modifies target nucleic acid (e.g., nuclease activity, methyltransferase activity, demethylase activity, DNA repair activity, DNA damage activity, deamination activity, dismutase activity, alkylation activity, depurination activity, oxidation activity, pyrimidine dimer forming activity, integrase activity, transposase activity, recombinase activity, polymerase activity, ligase activity, helicase activity, photolyase activity or glycosylase activity).

[0236] In other cases, a subject Cas9 polypeptide (e.g., a chimeric Cas9 polypeptide) has enzymatic activity that modifies a polypeptide (e.g., a histone) associated with target nucleic acid (e.g., methyltransferase activity, demethylase activity, acetyltransferase activity, deacetylase activity, kinase activity, phosphatase activity, ubiquitin ligase activity, deubiquitinating activity, adenylation activity, deadenylation activity, SUMOylating activity, deSUMOylating activity, ribosylation activity, deribosylation activity, myristoylation activity or demyristoylation activity).

[0237] Many Cas9 orthologs from a wide variety of species have been identified and the proteins share only a few identical amino acids. All identified Cas9 orthologs have the same domain architecture with a central HNH endonuclease domain and a split RuvC/RNaseH domain (See FIG. 9, FIG. 10, and Table 1). Cas9 proteins share 4 key motifs with a conserved architecture. Motifs 1, 2, and 4 are RuvC like motifs while motif 3 is an HNH-motif. In some cases, a suitable Cas9 polypeptide comprises an amino acid sequence having 4 motifs, each of motifs 1-4 having 60% or more, 70% or more, 75% or more, 80% or more, 85% or more, 90% or more, 95% or more, 99% or more or 100% amino acid sequence identity to motifs 1-4 of the Cas9 amino acid sequence depicted in FIG. 9A (SEQ ID NOs:260-263, respectively, as depicted in Table 1), or to the corresponding portions in any of the amino acid sequences set forth in SEQ ID NOs:1-256 and 795-1346 (see FIG. 10 for an alignment of motifs 1-4 from divergent Cas9 sequences).

[0238] In some cases, a suitable Cas9 polypeptide comprises an amino acid sequence having 4 motifs, each of motifs 1-4 having 60% or more amino acid sequence identity to motifs 1-4 of the Cas9 amino acid sequence depicted in FIG. 9A (SEQ ID NOs:260-263, respectively, as depicted in Table 1), or to the corresponding portions in any of the amino acid sequences set forth in SEQ ID NOs:1-256 and 795-1346 (see FIG. 10 for an alignment of motifs 1-4 from divergent Cas9 sequences).

[0239] In some cases, a suitable Cas9 polypeptide comprises an amino acid sequence having 4 motifs, each of motifs 1-4 having 70% or more amino acid sequence identity to motifs 1-4 of the Cas9 amino acid sequence depicted in FIG. 9A (SEQ ID NOs:260-263, respectively, as depicted in Table 1), or to the corresponding portions in any of the amino acid sequences set forth in SEQ ID NOs:1-256 and 795-1346 (see FIG. 10 for an alignment of motifs 1-4 from divergent Cas9 sequences).

[0240] In some cases, a suitable Cas9 polypeptide comprises an amino acid sequence having 4 motifs, each of motifs 1-4 having 75% or more amino acid sequence identity to motifs 1-4 of the Cas9 amino acid sequence depicted in FIG. 9A (SEQ ID NOs:260-263, respectively, as depicted in Table 1), or to the corresponding portions in any of the amino acid sequences set forth in SEQ ID NOs:1-256 and 795-1346 (see FIG. 10 for an alignment of motifs 1-4 from divergent Cas9 sequences).

[0241] In some cases, a suitable Cas9 polypeptide comprises an amino acid sequence having 4 motifs, each of motifs 1-4 having 80% or more amino acid sequence identity to motifs 1-4 of the Cas9 amino acid sequence depicted in FIG. 9A (SEQ ID NOs:260-263, respectively, as depicted in Table 1), or to the corresponding portions in any of the amino acid sequences set forth in SEQ ID NOs:1-256 and 795-1346 (see FIG. 10 for an alignment of motifs 1-4 from divergent Cas9 sequences).

[0242] In some cases, a suitable Cas9 polypeptide comprises an amino acid sequence having 4 motifs, each of motifs 1-4 having 85% or more amino acid sequence identity to motifs 1-4 of the Cas9 amino acid sequence depicted in FIG. 9A (SEQ ID NOs:260-263, respectively, as depicted in Table 1), or to the corresponding portions in any of the amino acid sequences set forth in SEQ ID NOs:1-256 and 795-1346 (see FIG. 10 for an alignment of motifs 1-4 from divergent Cas9 sequences).

[0243] In some cases, a suitable Cas9 polypeptide comprises an amino acid sequence having 4 motifs, each of motifs 1-4 having 90% or more amino acid sequence identity to motifs 1-4 of the Cas9 amino acid sequence depicted in FIG. 9A (SEQ ID NOs:260-263, respectively, as depicted in Table 1), or to the corresponding portions in any of the amino acid sequences set forth in SEQ ID NOs:1-256 and 795-1346 (see FIG. 10 for an alignment of motifs 1-4 from divergent Cas9 sequences).

[0244] In some cases, a suitable Cas9 polypeptide comprises an amino acid sequence having 4 motifs, each of motifs 1-4 having 95% or more amino acid sequence identity to motifs 1-4 of the Cas9 amino acid sequence depicted in FIG. 9A (SEQ ID NOs:260-263, respectively, as depicted in Table 1), or to the corresponding portions in any of the amino acid sequences set forth in SEQ ID NOs:1-256 and 795-1346 (see FIG. 10 for an alignment of motifs 1-4 from divergent Cas9 sequences).

[0245] In some cases, a suitable Cas9 polypeptide comprises an amino acid sequence having 4 motifs, each of motifs 1-4 having 99% or more amino acid sequence identity to motifs 1-4 of the Cas9 amino acid sequence depicted in FIG. 9A (SEQ ID NOs:260-263, respectively, as depicted in Table 1), or to the corresponding portions in any of the amino acid sequences set forth in SEQ ID NOs:1-256 and 795-1346 (see FIG. 10 for an alignment of motifs 1-4 from divergent Cas9 sequences).

[0246] In some cases, a suitable Cas9 polypeptide comprises an amino acid sequence having 4 motifs, each of motifs 1-4 having 100% amino acid sequence identity to motifs 1-4 of the Cas9 amino acid sequence depicted in FIG. 9A (SEQ ID NOs:260-263, respectively, as depicted in Table 1), or to the corresponding portions in any of the amino acid sequences set forth in SEQ ID NOs:1-256 and 795-1346 (see FIG. 10 for an alignment of motifs 1-4 from divergent Cas9 sequences).

[0247] In some cases, a suitable Cas9 polypeptide comprises an amino acid sequence having 60% or more, 70% or more, 75% or more, 80% or more, 85% or more, 90% or more, 95% or more, 99% or more or 100% amino acid sequence identity to amino acids 7-166 or 731-1003 of the Cas9 amino acid sequence depicted in FIG. 9 (SEQ ID NO:8), or to the corresponding portions in any of the amino acid sequences set forth as SEQ ID NOs:1-256 and 795-1346. Any Cas9 protein as defined above can be used as a Cas9 polypeptide or as part of a chimeric Cas9 polypeptide of the subject methods.

[0248] In some cases, a suitable Cas9 polypeptide comprises an amino acid sequence having 60% or more amino acid sequence identity to amino acids 7-166 or 731-1003 of the Cas9 amino acid sequence depicted in FIG. 9 (SEQ ID NO:8), or to the corresponding portions in any of the amino acid sequences set forth as SEQ ID NOs:1-256 and 795-1346. Any Cas9 protein as defined above can be used as a Cas9 polypeptide or as part of a chimeric Cas9 polypeptide of the subject methods.

[0249] In some cases, a suitable Cas9 polypeptide comprises an amino acid sequence having 70% or more amino acid sequence identity to amino acids 7-166 or 731-1003 of the Cas9 amino acid sequence depicted in FIG. 9 (SEQ ID NO:8), or to the corresponding portions in any of the amino acid sequences set forth as SEQ ID NOs:1-256 and 795-1346. Any Cas9 protein as defined above can be used as a Cas9 polypeptide or as part of a chimeric Cas9 polypeptide of the subject methods.

[0250] In some cases, a suitable Cas9 polypeptide comprises an amino acid sequence having 75% or more amino acid sequence identity to amino acids 7-166 or 731-1003 of the Cas9 amino acid sequence depicted in FIG. 9 (SEQ ID NO:8), or to the corresponding portions in any of the amino acid sequences set forth as SEQ ID NOs:1-256 and 795-1346. Any Cas9 protein as defined above can be used as a Cas9 polypeptide or as part of a chimeric Cas9 polypeptide of the subject methods.

[0251] In some cases, a suitable Cas9 polypeptide comprises an amino acid sequence having 80% or more amino acid sequence identity to amino acids 7-166 or 731-1003 of the Cas9 amino acid sequence depicted in FIG. 9 (SEQ ID NO:8), or to the corresponding portions in any of the amino acid sequences set forth as SEQ ID NOs:1-256 and 795-1346. Any Cas9 protein as defined above can be used as a Cas9 polypeptide or as part of a chimeric Cas9 polypeptide of the subject methods.

[0252] In some cases, a suitable Cas9 polypeptide comprises an amino acid sequence having 85% or more amino acid sequence identity to amino acids 7-166 or 731-1003 of the Cas9 amino acid sequence depicted in FIG. 9 (SEQ ID NO:8), or to the corresponding portions in any of the amino acid sequences set forth as SEQ ID NOs:1-256 and 795-1346. Any Cas9 protein as defined above can be used as a Cas9 polypeptide or as part of a chimeric Cas9 polypeptide of the subject methods.

[0253] In some cases, a suitable Cas9 polypeptide comprises an amino acid sequence having 90% or more amino acid sequence identity to amino acids 7-166 or 731-1003 of the Cas9 amino acid sequence depicted in FIG. 9 (SEQ ID NO:8), or to the corresponding portions in any of the amino acid sequences set forth as SEQ ID NOs:1-256 and 795-1346. Any Cas9 protein as defined above can be used as a Cas9 polypeptide or as part of a chimeric Cas9 polypeptide of the subject methods.

[0254] In some cases, a suitable Cas9 polypeptide comprises an amino acid sequence having 95% or more amino acid sequence identity to amino acids 7-166 or 731-1003 of the Cas9 amino acid sequence depicted in FIG. 9 (SEQ ID NO:8), or to the corresponding portions in any of the amino acid sequences set forth as SEQ ID NOs:1-256 and 795-1346. Any Cas9 protein as defined above can be used as a Cas9 polypeptide or as part of a chimeric Cas9 polypeptide of the subject methods.

[0255] In some cases, a suitable Cas9 polypeptide comprises an amino acid sequence having 99% or more amino acid sequence identity to amino acids 7-166 or 731-1003 of the Cas9 amino acid sequence depicted in FIG. 9 (SEQ ID NO:8), or to the corresponding portions in any of the amino acid sequences set forth as SEQ ID NOs:1-256 and 795-1346. Any Cas9 protein as defined above can be used as a Cas9 polypeptide or as part of a chimeric Cas9 polypeptide of the subject methods.

[0256] In some cases, a suitable Cas9 polypeptide comprises an amino acid sequence having 100% amino acid sequence identity to amino acids 7-166 or 731-1003 of the Cas9 amino acid sequence depicted in FIG. 9 (SEQ ID NO:8), or to the corresponding portions in any of the amino acid sequences set forth as SEQ ID NOs:1-256 and 795-1346. Any Cas9 protein as defined above can be used as a Cas9 polypeptide or as part of a chimeric Cas9 polypeptide of the subject methods.

[0257] In some cases, a suitable Cas9 polypeptide comprises an amino acid sequence having 60% or more, 70% or more, 75% or more, 80% or more, 85% or more, 90% or more, 95% or more, 99% or more or 100% amino acid sequence identity to the Cas9 amino acid sequence depicted in FIG. 9 (SEQ ID NO:8), or to any of the amino acid sequences set forth as SEQ ID NOs:1-256 and 795-1346. Any Cas9 protein as defined above can be used as a Cas9 polypeptide or as part of a chimeric Cas9 polypeptide of the subject methods.

[0258] In some cases, a suitable Cas9 polypeptide comprises an amino acid sequence having 60% or more amino acid sequence identity to the Cas9 amino acid sequence depicted in FIG. 9 (SEQ ID NO:8), or to any of the amino acid sequences set forth as SEQ ID NOs:1-256 and 795-1346. Any Cas9 protein as defined above can be used as a Cas9 polypeptide or as part of a chimeric Cas9 polypeptide of the subject methods.

[0259] In some cases, a suitable Cas9 polypeptide comprises an amino acid sequence having 70% or more amino acid sequence identity to the Cas9 amino acid sequence depicted in FIG. 9 (SEQ ID NO:8), or to any of the amino acid sequences set forth as SEQ ID NOs:1-256 and 795-1346. Any Cas9 protein as defined above can be used as a Cas9 polypeptide or as part of a chimeric Cas9 polypeptide of the subject methods.

[0260] In some cases, a suitable Cas9 polypeptide comprises an amino acid sequence having 75% or more amino acid sequence identity to the Cas9 amino acid sequence depicted in FIG. 9 (SEQ ID NO:8), or to any of the amino acid sequences set forth as SEQ ID NOs:1-256 and 795-1346. Any Cas9 protein as defined above can be used as a Cas9 polypeptide or as part of a chimeric Cas9 polypeptide of the subject methods.

[0261] In some cases, a suitable Cas9 polypeptide comprises an amino acid sequence having 80% or more amino acid sequence identity to the Cas9 amino acid sequence depicted in FIG. 9 (SEQ ID NO:8), or to any of the amino acid sequences set forth as SEQ ID NOs:1-256 and 795-1346. Any Cas9 protein as defined above can be used as a Cas9 polypeptide or as part of a chimeric Cas9 polypeptide of the subject methods.

[0262] In some cases, a suitable Cas9 polypeptide comprises an amino acid sequence having 85% or more amino acid sequence identity to the Cas9 amino acid sequence depicted in FIG. 9 (SEQ ID NO:8), or to any of the amino acid sequences set forth as SEQ ID NOs:1-256 and 795-1346. Any Cas9 protein as defined above can be used as a Cas9 polypeptide or as part of a chimeric Cas9 polypeptide of the subject methods.

[0263] In some cases, a suitable Cas9 polypeptide comprises an amino acid sequence having 90% or more amino acid sequence identity to the Cas9 amino acid sequence depicted in FIG. 9 (SEQ ID NO:8), or to any of the amino acid sequences set forth as SEQ ID NOs:1-256 and 795-1346. Any Cas9 protein as defined above can be used as a Cas9 polypeptide or as part of a chimeric Cas9 polypeptide of the subject methods.

[0264] In some cases, a suitable Cas9 polypeptide comprises an amino acid sequence having 95% or more amino acid sequence identity to the Cas9 amino acid sequence depicted in FIG. 9 (SEQ ID NO:8), or to any of the amino acid sequences set forth as SEQ ID NOs:1-256 and 795-1346. Any Cas9 protein as defined above can be used as a Cas9 polypeptide or as part of a chimeric Cas9 polypeptide of the subject methods.

[0265] In some cases, a suitable Cas9 polypeptide comprises an amino acid sequence having 99% or more amino acid sequence identity to the Cas9 amino acid sequence depicted in FIG. 9 (SEQ ID NO:8), or to any of the amino acid sequences set forth as SEQ ID NOs:1-256 and 795-1346. Any Cas9 protein as defined above can be used as a Cas9 polypeptide or as part of a chimeric Cas9 polypeptide of the subject methods.

[0266] In some cases, a suitable Cas9 polypeptide comprises an amino acid sequence having 100% amino acid sequence identity to the Cas9 amino acid sequence depicted in FIG. 9 (SEQ ID NO:8), or to any of the amino acid sequences set forth as SEQ ID NOs:1-256 and 795-1346. Any Cas9 protein as defined above can be used as a Cas9 polypeptide or as part of a chimeric Cas9 polypeptide of the subject methods.

[0267] In some cases, a Cas9 polypeptide comprises 4 motifs (as listed in Table 1 and depicted in FIG. 9A and FIG. 10), at least one with (or each with) amino acid sequences having 75% or more, 80% or more, 85% or more, 90% or more, 95% or more, 99% or more or 100% amino acid sequence identity to each of the 4 motifs listed in Table 1 (SEQ ID NOs:260-263), or to the corresponding portions in any of the amino acid sequences set forth as SEQ ID NOs:1-256 and 795-1346.

[0268] As used herein, the term “Cas9 polypeptide” encompasses the term “variant Cas9 polypeptide”; and the term “variant Cas9 polypeptide” encompasses the term “chimeric Cas9 polypeptide.”

[0269] Variant Cas9 Polypeptides

[0270] The present disclosure provides composition and methods include a variant Cas9 polypeptide. A variant Cas9 polypeptide has an amino acid sequence that is different by one amino acid (e.g., has a deletion, insertion, substitution, fusion) (i.e., different by at least one amino acid) when compared to the amino acid sequence of a wild type Cas9 polypeptide. In some instances, the variant Cas9 polypeptide has an amino acid change (e.g., deletion, insertion, or substitution) that reduces the nuclease activity of the Cas9 polypeptide. For example, in some instances, the variant Cas9 polypeptide has less than 50%, less than 40%, less than 30%, less than 20%, less than 10%, less than 5%, or less than 1% of the nuclease activity of the corresponding wild-type Cas9 polypeptide. In some cases, the variant Cas9 polypeptide has no substantial nuclease activity. When a subject Cas9 polypeptide is a variant Cas9 polypeptide that has no substantial nuclease activity, it can be referred to as “dCas9.”

[0271] In some cases, a variant Cas9 polypeptide has reduced nuclease activity. For example, a variant Cas9 polypeptide suitable for use in a binding method of the present disclosure exhibits less than about 20%, less than about 15%, less than about 10%, less than about 5%, less than about 1%, or less than about 0.1%, of the endonuclease activity of a wild-type Cas9 polypeptide, e.g., a wild-type Cas9 polypeptide comprising an amino acid sequence as depicted in FIG. 9 (SEQ ID NO:8).

[0272] In some cases, a variant Cas9 polypeptide can cleave the complementary strand of a target nucleic acid but has reduced ability to cleave the non-complementary strand of a double stranded target nucleic acid. For example, the variant Cas9 polypeptide can have a mutation (amino acid substitution) that reduces the function of the RuvC domain (e.g., “domain 1” of FIG. 9B). As a non-limiting example, in some embodiments, a variant Cas9 polypeptide has a D10A (aspartate to alanine at amino acid position 10 of SEQ ID NO:8) mutation (or the corresponding mutation of any of the proteins presented in SEQ ID NOs:1-256 and 795-1346) and can therefore cleave the complementary strand of a double stranded target nucleic acid but has reduced ability to cleave the non-complementary strand of a double stranded target nucleic acid (thus resulting in a single strand break (SSB) instead of a double strand break (DSB) when the variant Cas9 polypeptide cleaves a double stranded target nucleic acid) (see, for example, Jinek et al., Science. 2012 Aug. 17; 337(6096):816-21).

[0273] In some cases, a variant Cas9 polypeptide can cleave the non-complementary strand of a double stranded target nucleic acid but has reduced ability to cleave the complementary strand of the target nucleic acid. For example, the variant Cas9 polypeptide can have a mutation (amino acid substitution) that reduces the function of the HNH domain (RuvC/HNH/RuvC domain motifs, “domain 2” of FIG. 9B). As a non-limiting example, in some embodiments, the variant Cas9 polypeptide has an H840A (histidine to alanine at amino acid position 840) mutation (or the corresponding mutation of any of the proteins set forth as SEQ ID NOs:1-256 and 795-1346) and can therefore cleave the non-complementary strand of the target nucleic acid but has reduced ability to cleave the complementary strand of the target nucleic acid (thus resulting in a SSB instead of a DSB when the variant Cas9 polypeptide cleaves a double stranded target nucleic acid). Such a Cas9 polypeptide has a reduced ability to cleave a target nucleic acid (e.g., a single stranded target nucleic acid) but retains the ability to bind a target nucleic acid (e.g., a single stranded target nucleic acid).

[0274] In some cases, a variant Cas9 polypeptide has a reduced ability to cleave both the complementary and the non-complementary strands of a double stranded target nucleic acid. As a non-limiting example, in some cases, the variant Cas9 polypeptide harbors both the D10A and the H840A mutations (or the corresponding mutations of any of the proteins set forth as SEQ ID NOs:1-256 and 795-1346) such that the polypeptide has a reduced ability to cleave both the complementary and the non-complementary strands of a double stranded target nucleic acid. Such a Cas9 polypeptide has a reduced ability to cleave a target nucleic acid (e.g., a single stranded target nucleic acid) but retains the ability to bind a target nucleic acid (e.g., a single stranded target nucleic acid).

[0275] As another non-limiting example, in some cases, the variant Cas9 polypeptide harbors W476A and W1126A mutations (or the corresponding mutations of any of the proteins set forth as SEQ ID NOs:1-256 and 795-1346) such that the polypeptide has a reduced ability to cleave a target nucleic acid (FIG. 16). Such a Cas9 polypeptide has a reduced ability to cleave a target nucleic acid (e.g., a single stranded target nucleic acid) but retains the ability to bind a target nucleic acid (e.g., a single stranded target nucleic acid).

[0276] As another non-limiting example, in some cases, the variant Cas9 polypeptide harbors P475A, W476A, N477A, D1125A, W1126A, and D1127A mutations (or the corresponding mutations of any of the proteins set forth as SEQ ID NOs:1-256 and 795-1346) such that the polypeptide has a reduced ability to cleave a target nucleic acid (FIG. 16). Such a Cas9 polypeptide has a reduced ability to cleave a target nucleic acid (e.g., a single stranded target nucleic acid) but retains the ability to bind a target nucleic acid (e.g., a single stranded target nucleic acid).

[0277] As another non-limiting example, in some cases, the variant Cas9 polypeptide harbors H840A, W476A, and W1126A, mutations (or the corresponding mutations of any of the proteins set forth as SEQ ID NOs:1-256 and 795-1346) such that the polypeptide has a reduced ability to cleave a target nucleic acid. Such a Cas9 polypeptide has a reduced ability to cleave a target nucleic acid (e.g., a single stranded target nucleic acid) but retains the ability to bind a target nucleic acid (e.g., a single stranded target nucleic acid).

[0278] As another non-limiting example, in some cases, the variant Cas9 polypeptide harbors H840A, D10A, W476A, and W1126A, mutations (or the corresponding mutations of any of the proteins set forth as SEQ ID NOs:1-256 and 795-1346) such that the polypeptide has a reduced ability to cleave a target nucleic acid. Such a Cas9 polypeptide has a reduced ability to cleave a target nucleic acid (e.g., a single stranded target nucleic acid) but retains the ability to bind a target nucleic acid (e.g., a single stranded target nucleic acid).

[0279] As another non-limiting example, in some cases, the variant Cas9 polypeptide harbors, H840A, P475A, W476A, N477A, D1125A, W1126A, and D1127A mutations (or the corresponding mutations of any of the proteins set forth as SEQ ID NOs:1-256 and 795-1346) such that the polypeptide has a reduced ability to cleave a target nucleic acid. Such a Cas9 polypeptide has a reduced ability to cleave a target nucleic acid (e.g., a single stranded target nucleic acid) but retains the ability to bind a target nucleic acid (e.g., a single stranded target nucleic acid).

[0280] As another non-limiting example, in some cases, the variant Cas9 polypeptide harbors D10A, H840A, P475A, W476A, N477A, D1125A, W1126A, and D1127A mutations (or the corresponding mutations of any of the proteins set forth as SEQ ID NOs:1-256 and 795-1346) such that the polypeptide has a reduced ability to cleave a target nucleic acid. Such a Cas9 polypeptide has a reduced ability to cleave a target nucleic acid (e.g., a single stranded target nucleic acid) but retains the ability to bind a target nucleic acid (e.g., a single stranded target nucleic acid).

[0281] In some cases, when a variant Cas9 polypeptide harbors W476A and W1126A mutations (or the corresponding mutations of any of the proteins set forth as SEQ ID NOs:1-256 and 795-1346); or when the variant Cas9 polypeptide harbors P475A, W476A, N477A, D1125A, W1126A, and D1127A mutations (or the corresponding mutations of any of the proteins set forth as SEQ ID NOs:1-256 and 795-1346), the variant Cas9 polypeptide does not bind efficiently to a PAM sequence. Thus, in some such cases, when such a variant Cas9 polypeptide is used in a method of binding, the method need not include a PAMmer. In other words, in some cases, when such a variant Cas9 polypeptide is used in a method of binding, the method can include a guide nucleic acid, but the method can be performed in the absence of a PAMmer (and the specificity of binding is therefore provided by the targeting segment of the guide nucleic acid).

[0282] Other residues can be mutated to achieve the above effects (i.e. inactivate one or the other nuclease portions). As non-limiting examples, residues D10, G12, G17, E762, H840, N854, N863, H982, H983, A984, D986, and/or A987 (or the corresponding mutations of any of the proteins set forth as SEQ ID NOs:1-256 and 795-1346) can be altered (i.e., substituted) (see FIG. 9, FIG. 10, FIG. 16, and Table 1 for more information regarding the conservation of Cas9 amino acid residues). Also, mutations other than alanine substitutions are suitable.

[0283] In some embodiments, a variant Cas9 polypeptide that has reduced catalytic activity (e.g., when a Cas9 protein has a D10, G12, G17, E762, H840, N854, N863, H982, H983, A984, D986, and/or a A987 mutation, e.g., D10A, G12A, G17A, E762A, H840A, N854A, N863A, H982A, H983A, A984A, and/or D986A), the variant Cas9 polypeptide can still bind to target nucleic acid in a site-specific manner (because it is still guided to a target nucleic acid sequence by a guide nucleic acid) as long as it retains the ability to interact with the guide nucleic acid. Table 1 lists 4 motifs that are present in Cas9 sequences from various species (see also FIG. 9 and FIG. 10). The amino acids listed here are from the Cas9 from S. pyogenes (SEQ ID NO:8).

TABLE 1

| Motif # | Motif | Amino acids (residue #s) | Highly conserved |
|---|---|---|---|
| 1 | RuvC-like I | IGLDIGTNSVGWAVI (7-21) | D10, G12, G17 |
| | | (SEQ ID NO: 260) | |
| 2 | RuvC-like II | IVIEMARE (759-766) | E762 |
| | | (SEQ ID NO: 261) | |
| 3 | HNH-motif | DVDHIVPQSFLKDDSIDNKVLTRSDKN | H840, N854, N863 |
| | | (837-863) | |
| | | (SEQ ID NO: 262) | |
| 4 | RuvC-like II | HHAHDAYL (982-989) | H982, H983, A984, |
| | | (SEQ ID NO: 263) | D986, A987 |

[0284] In addition to the above, a variant Cas9 protein can have the same parameters for sequence identity as described above for Cas9 polypeptides. Thus, in some cases, a suitable variant Cas9 polypeptide comprises an amino acid sequence having 4 motifs, each of motifs 1-4 having 60% or more, 70% or more, 75% or more, 80% or more, 85% or more, 90% or more, 95% or more, 99% or more or 100% amino acid sequence identity to motifs 1-4 of the Cas9 amino acid sequence depicted in FIG. 9A (SEQ ID NOs:260-263, respectively, as depicted in Table 1), or to the corresponding portions in any of the amino acid sequences set forth in SEQ ID NOs:1-256 and 795-1346 (see FIG. 10 for an alignment of motifs 1-4 from divergent Cas9 sequences).

[0285] In some cases, a suitable variant Cas9 polypeptide comprises an amino acid sequence having 4 motifs, each of motifs 1-4 having 60% or more amino acid sequence identity to motifs 1-4 of the Cas9 amino acid sequence depicted in FIG. 9A (SEQ ID NOs:260-263, respectively, as depicted in Table 1), or to the corresponding portions in any of the amino acid sequences set forth in SEQ ID NOs:1-256 and 795-1346 (see FIG. 10 for an alignment of motifs 1-4 from divergent Cas9 sequences).

[0286] In some cases, a suitable variant Cas9 polypeptide comprises an amino acid sequence having 4 motifs, each of motifs 1-4 having 70% or more amino acid sequence identity to motifs 1-4 of the Cas9 amino acid sequence depicted in FIG. 9A (SEQ ID NOs:260-263, respectively, as depicted in Table 1), or to the corresponding portions in any of the amino acid sequences set forth in SEQ ID NOs:1-256 and 795-1346 (see FIG. 10 for an alignment of motifs 1-4 from divergent Cas9 sequences).

[0287] In some cases, a suitable variant Cas9 polypeptide comprises an amino acid sequence having 4 motifs, each of motifs 1-4 having 75% or more amino acid sequence identity to motifs 1-4 of the Cas9 amino acid sequence depicted in FIG. 9A (SEQ ID NOs:260-263, respectively, as depicted in Table 1), or to the corresponding portions in any of the amino acid sequences set forth in SEQ ID NOs:1-256 and 795-1346 (see FIG. 10 for an alignment of motifs 1-4 from divergent Cas9 sequences).

[0288] In some cases, a suitable variant Cas9 polypeptide comprises an amino acid sequence having 4 motifs, each of motifs 1-4 having 80% or more amino acid sequence identity to motifs 1-4 of the Cas9 amino acid sequence depicted in FIG. 9A (SEQ ID NOs:260-263, respectively, as depicted in Table 1), or to the corresponding portions in any of the amino acid sequences set forth in SEQ ID NOs:1-256 and 795-1346 (see FIG. 10 for an alignment of motifs 1-4 from divergent Cas9 sequences).

[0289] In some cases, a suitable variant Cas9 polypeptide comprises an amino acid sequence having 4 motifs, each of motifs 1-4 having 85% or more amino acid sequence identity to motifs 1-4 of the Cas9 amino acid sequence depicted in FIG. 9A (SEQ ID NOs:260-263, respectively, as depicted in Table 1), or to the corresponding portions in any of the amino acid sequences set forth in SEQ ID NOs:1-256 and 795-1346 (see FIG. 10 for an alignment of motifs 1-4 from divergent Cas9 sequences).

[0290] In some cases, a suitable variant Cas9 polypeptide comprises an amino acid sequence having 4 motifs, each of motifs 1-4 having 90% or more amino acid sequence identity to motifs 1-4 of the Cas9 amino acid sequence depicted in FIG. 9A (SEQ ID NOs:260-263, respectively, as depicted in Table 1), or to the corresponding portions in any of the amino acid sequences set forth in SEQ ID NOs:1-256 and 795-1346 (see FIG. 10 for an alignment of motifs 1-4 from divergent Cas9 sequences).

[0291] In some cases, a suitable variant Cas9 polypeptide comprises an amino acid sequence having 4 motifs, each of motifs 1-4 having 95% or more amino acid sequence identity to motifs 1-4 of the Cas9 amino acid sequence depicted in FIG. 9A (SEQ ID NOs:260-263, respectively, as depicted in Table 1), or to the corresponding portions in any of the amino acid sequences set forth in SEQ ID NOs:1-256 and 795-1346 (see FIG. 10 for an alignment of motifs 1-4 from divergent Cas9 sequences).

[0292] In some cases, a suitable variant Cas9 polypeptide comprises an amino acid sequence having 4 motifs, each of motifs 1-4 having 99% or more amino acid sequence identity to motifs 1-4 of the Cas9 amino acid sequence depicted in FIG. 9A (SEQ ID NOs:260-263, respectively, as depicted in Table 1), or to the corresponding portions in any of the amino acid sequences set forth in SEQ ID NOs:1-256 and 795-1346 (see FIG. 10 for an alignment of motifs 1-4 from divergent Cas9 sequences).

[0293] In some cases, a suitable variant Cas9 polypeptide comprises an amino acid sequence having 4 motifs, each of motifs 1-4 having 100% amino acid sequence identity to motifs 1-4 of the Cas9 amino acid sequence depicted in FIG. 9A (SEQ ID NOs:260-263, respectively, as depicted in Table 1), or to the corresponding portions in any of the amino acid sequences set forth in SEQ ID NOs:1-256 and 795-1346 (see FIG. 10 for an alignment of motifs 1-4 from divergent Cas9 sequences).

[0294] In some cases, a suitable variant Cas9 polypeptide comprises an amino acid sequence having 60% or more, 70% or more, 75% or more, 80% or more, 85% or more, 90% or more, 95% or more, 99% or more, or 100% amino acid sequence identity to amino acids 7-166 or 731-1003 of the Cas9 amino acid sequence depicted in FIG. 9 (SEQ ID NO:8), or to the corresponding portions in any of the amino acid sequences set forth as SEQ ID NOs:1-256 and 795-1346. Any Cas9 protein as defined above can be used as a variant Cas9 polypeptide or as part of a chimeric variant Cas9 polypeptide of the subject methods.

[0295] In some cases, a suitable variant Cas9 polypeptide comprises an amino acid sequence having 60% or more amino acid sequence identity to amino acids 7-166 or 731-1003 of the Cas9 amino acid sequence depicted in FIG. 9 (SEQ ID NO:8), or to the corresponding portions in any of the amino acid sequences set forth as SEQ ID NOs:1-256 and 795-1346. Any Cas9 protein as defined above can be used as a variant Cas9 polypeptide or as part of a chimeric variant Cas9 polypeptide of the subject methods.

[0296] In some cases, a suitable variant Cas9 polypeptide comprises an amino acid sequence having 70% or more amino acid sequence identity to amino acids 7-166 or 731-1003 of the Cas9 amino acid sequence depicted in FIG. 9 (SEQ ID NO:8), or to the corresponding portions in any of the amino acid sequences set forth as SEQ ID NOs:1-256 and 795-1346. Any Cas9 protein as defined above can be used as a variant Cas9 polypeptide or as part of a chimeric variant Cas9 polypeptide of the subject methods.

[0297] In some cases, a suitable variant Cas9 polypeptide comprises an amino acid sequence having 75% or more amino acid sequence identity to amino acids 7-166 or 731-1003 of the Cas9 amino acid sequence depicted in FIG. 9 (SEQ ID NO:8), or to the corresponding portions in any of the amino acid sequences set forth as SEQ ID NOs:1-256 and 795-1346. Any Cas9 protein as defined above can be used as a variant Cas9 polypeptide or as part of a chimeric variant Cas9 polypeptide of the subject methods.

[0298] In some cases, a suitable variant Cas9 polypeptide comprises an amino acid sequence having 80% or more amino acid sequence identity to amino acids 7-166 or 731-1003 of the Cas9 amino acid sequence depicted in FIG. 9 (SEQ ID NO:8), or to the corresponding portions in any of the amino acid sequences set forth as SEQ ID NOs:1-256 and 795-1346. Any Cas9 protein as defined above can be used as a variant Cas9 polypeptide or as part of a chimeric variant Cas9 polypeptide of the subject methods.

[0299] In some cases, a suitable variant Cas9 polypeptide comprises an amino acid sequence having 85% or more amino acid sequence identity to amino acids 7-166 or 731-1003 of the Cas9 amino acid sequence depicted in FIG. 9 (SEQ ID NO:8), or to the corresponding portions in any of the amino acid sequences set forth as SEQ ID NOs:1-256 and 795-1346. Any Cas9 protein as defined above can be used as a variant Cas9 polypeptide or as part of a chimeric variant Cas9 polypeptide of the subject methods.

[0300] In some cases, a suitable variant Cas9 polypeptide comprises an amino acid sequence having 90% or more amino acid sequence identity to amino acids 7-166 or 731-1003 of the Cas9 amino acid sequence depicted in FIG. 9 (SEQ ID NO:8), or to the corresponding portions in any of the amino acid sequences set forth as SEQ ID NOs:1-256 and 795-1346. Any Cas9 protein as defined above can be used as a variant Cas9 polypeptide or as part of a chimeric variant Cas9 polypeptide of the subject methods.

[0301] In some cases, a suitable variant Cas9 polypeptide comprises an amino acid sequence having 95% or more amino acid sequence identity to amino acids 7-166 or 731-1003 of the Cas9 amino acid sequence depicted in FIG. 9 (SEQ ID NO:8), or to the corresponding portions in any of the amino acid sequences set forth as SEQ ID NOs:1-256 and 795-1346. Any Cas9 protein as defined above can be used as a variant Cas9 polypeptide or as part of a chimeric variant Cas9 polypeptide of the subject methods.

[0302] In some cases, a suitable variant Cas9 polypeptide comprises an amino acid sequence having 99% or more amino acid sequence identity to amino acids 7-166 or 731-1003 of the Cas9 amino acid sequence depicted in FIG. 9 (SEQ ID NO:8), or to the corresponding portions in any of the amino acid sequences set forth as SEQ ID NOs:1-256 and 795-1346. Any Cas9 protein as defined above can be used as a variant Cas9 polypeptide or as part of a chimeric variant Cas9 polypeptide of the subject methods.

[0303] In some cases, a suitable variant Cas9 polypeptide comprises an amino acid sequence having 100% amino acid sequence identity to amino acids 7-166 or 731-1003 of the Cas9 amino acid sequence depicted in FIG. 9 (SEQ ID NO:8), or to the corresponding portions in any of the amino acid sequences set forth as SEQ ID NOs:1-256 and 795-1346. Any Cas9 protein as defined above can be used as a variant Cas9 polypeptide or as part of a chimeric variant Cas9 polypeptide of the subject methods.

[0304] In some cases, a suitable variant Cas9 polypeptide comprises an amino acid sequence having 60% or more, 70% or more, 75% or more, 80% or more, 85% or more, 90% or more, 95% or more, 99% or more, or 100% amino acid sequence identity to the Cas9 amino acid sequence depicted in FIG. 9 (SEQ ID NO:8), or to any of the amino acid sequences set forth as SEQ ID NOs:1-256 and 795-1346. Any Cas9 protein as defined above can be used as a variant Cas9 polypeptide or as part of a chimeric variant Cas9 polypeptide of the subject methods.

[0305] In some cases, a suitable variant Cas9 polypeptide comprises an amino acid sequence having 60% or more amino acid sequence identity to the Cas9 amino acid sequence depicted in FIG. 9 (SEQ ID NO:8), or to any of the amino acid sequences set forth as SEQ ID NOs:1-256 and 795-1346. Any Cas9 protein as defined above can be used as a variant Cas9 polypeptide or as part of a chimeric variant Cas9 polypeptide of the subject methods.

[0306] In some cases, a suitable variant Cas9 polypeptide comprises an amino acid sequence having 70% or more amino acid sequence identity to the Cas9 amino acid sequence depicted in FIG. 9 (SEQ ID NO:8), or to any of the amino acid sequences set forth as SEQ ID NOs:1-256 and 795-1346. Any Cas9 protein as defined above can be used as a variant Cas9 polypeptide or as part of a chimeric variant Cas9 polypeptide of the subject methods.

[0307] In some cases, a suitable variant Cas9 polypeptide comprises an amino acid sequence having 75% or more amino acid sequence identity to the Cas9 amino acid sequence depicted in FIG. 9 (SEQ ID NO:8), or to any of the amino acid sequences set forth as SEQ ID NOs:1-256 and 795-1346. Any Cas9 protein as defined above can be used as a variant Cas9 polypeptide or as part of a chimeric variant Cas9 polypeptide of the subject methods.

[0308] In some cases, a suitable variant Cas9 polypeptide comprises an amino acid sequence having 80% or more amino acid sequence identity to the Cas9 amino acid sequence depicted in FIG. 9 (SEQ ID NO:8), or to any of the amino acid sequences set forth as SEQ ID NOs:1-256 and 795-1346. Any Cas9 protein as defined above can be used as a variant Cas9 polypeptide or as part of a chimeric variant Cas9 polypeptide of the subject methods.

[0309] In some cases, a suitable variant Cas9 polypeptide comprises an amino acid sequence having 85% or more amino acid sequence identity to the Cas9 amino acid sequence depicted in FIG. 9 (SEQ ID NO:8), or to any of the amino acid sequences set forth as SEQ ID NOs:1-256 and 795-1346. Any Cas9 protein as defined above can be used as a variant Cas9 polypeptide or as part of a chimeric variant Cas9 polypeptide of the subject methods.

[0310] In some cases, a suitable variant Cas9 polypeptide comprises an amino acid sequence having 90% or more amino acid sequence identity to the Cas9 amino acid sequence depicted in FIG. 9 (SEQ ID NO:8), or to any of the amino acid sequences set forth as SEQ ID NOs:1-256 and 795-1346. Any Cas9 protein as defined above can be used as a variant Cas9 polypeptide or as part of a chimeric variant Cas9 polypeptide of the subject methods.

[0311] In some cases, a suitable variant Cas9 polypeptide comprises an amino acid sequence having 95% or more amino acid sequence identity to the Cas9 amino acid sequence depicted in FIG. 9 (SEQ ID NO:8), or to any of the amino acid sequences set forth as SEQ ID NOs:1-256 and 795-1346. Any Cas9 protein as defined above can be used as a variant Cas9 polypeptide or as part of a chimeric variant Cas9 polypeptide of the subject methods.

[0312] In some cases, a suitable variant Cas9 polypeptide comprises an amino acid sequence having 99% or more amino acid sequence identity to the Cas9 amino acid sequence depicted in FIG. 9 (SEQ ID NO:8), or to any of the amino acid sequences set forth as SEQ ID NOs:1-256 and 795-1346. Any Cas9 protein as defined above can be used as a variant Cas9 polypeptide or as part of a chimeric variant Cas9 polypeptide of the subject methods.

[0313] In some cases, a suitable variant Cas9 polypeptide comprises an amino acid sequence having 100% amino acid sequence identity to the Cas9 amino acid sequence depicted in FIG. 9 (SEQ ID NO:8), or to any of the amino acid sequences set forth as SEQ ID NOs:1-256 and 795-1346. Any Cas9 protein as defined above can be used as a variant Cas9 polypeptide or as part of a chimeric variant Cas9 polypeptide of the subject methods.

[0314] Chimeric Polypeptides (Fusion Polypetides)

[0315] In some embodiments, a variant Cas9 polypeptide is a chimeric Cas9 polypeptide (also referred to herein as a fusion polypeptide, e.g., a “Cas9 fusion polypeptide”). A Cas9 fusion polypeptide can bind and/or modify a target nucleic acid (e.g., cleave, methylate, demethylate, etc.) and/or a polypeptide associated with target nucleic acid (e.g., methylation, acetylation, etc., of, for example, a histone tail).

[0316] A Cas9 fusion polypeptide is a variant Cas9 polypeptide by virtue of differing in sequence from a wild type Cas9 polypeptide. A Cas9 fusion polypeptide is a Cas9 polypeptide (e.g., a wild type Cas9 polypeptide, a variant Cas9 polypeptide, a variant Cas9 polypeptide with reduced nuclease activity (as described above), and the like) fused to a covalently linked heterologous polypeptide (also referred to as a “fusion partner”). In some cases, a Cas9 fusion polypeptide is a variant Cas9 polypeptide with reduced nuclease activity (e.g., dCas9) fused to a covalently linked heterologous polypeptide. In some cases, the heterologous polypeptide exhibits (and therefore provides for) an activity (e.g., an enzymatic activity) that will also be exhibited by the Cas9 fusion polypeptide (e.g., methyltransferase activity, acetyltransferase activity, kinase activity, ubiquitinating activity, etc.). In some such cases, a method of binding, e.g., where the Cas9 polypeptide is a variant Cas9 polypeptide having a fusion partner (i.e., having a heterologous polypeptide) with an activity (e.g., an enzymatic activity) that modifies the target nucleic acid, the method can also be considered to be a method of modifying the target nucleic acid. In some cases, a method of binding a target nucleic acid (e.g., a single stranded target nucleic acid) can result in modification of the target nucleic acid. Thus, in some cases, a method of binding a target nucleic acid (e.g., a single stranded target nucleic acid) can be a method of modifying the target nucleic acid.

[0317] In some cases, the heterologous sequence provides for subcellular localization, i.e., the heterologous sequence is a subcellular localization sequence (e.g., a nuclear localization signal (NLS) for targeting to the nucleus, a sequence to keep the fusion protein out of the nucleus, e.g., a nuclear export sequence (NES), a sequence to keep the fusion protein retained in the cytoplasm, a mitochondrial localization signal for targeting to the mitochondria, a chloroplast localization signal for targeting to a chloroplast, an ER retention signal, and the like). In some embodiments, a variant Cas9 does not include a NLS so that the protein is not targeted to the nucleus (which can be advantageous, e.g., when the target nucleic acid is an RNA that is present in the cyosol). In some embodiments, the heterologous sequence can provide a tag (i.e., the heterologous sequence is a detectable label) for ease of tracking and/or purification (e.g., a fluorescent protein, e.g., green fluorescent protein (GFP), YFP, RFP, CFP, mCherry, tdTomato, and the like; a histidine tag, e.g., a 6×His tag; a hemagglutinin (HA) tag; a FLAG tag; a Myc tag; and the like). In some embodiments, the heterologous sequence can provide for increased or decreased stability (i.e., the heterologous sequence is a stability control peptide, e.g., a degron, which in some cases is controllable (e.g., a temperature sensitive or drug controllable degron sequence, see below). In some embodiments, the heterologous sequence can provide for increased or decreased transcription from the target nucleic acid (i.e., the heterologous sequence is a transcription modulation sequence, e.g., a transcription factor/activator or a fragment thereof, a protein or fragment thereof that recruits a transcription factor/activator, a transcription repressor or a fragment thereof, a protein or fragment thereof that recruits a transcription repressor, a small molecule/drug-responsive transcription regulator, etc.). In some embodiments, the heterologous sequence can provide a binding domain (i.e., the heterologous sequence is a protein binding sequence, e.g., to provide the ability of a Cas9 fusion polypeptide to bind to another protein of interest, e.g., a DNA or histone modifying protein, a transcription factor or transcription repressor, a recruiting protein, an RNA modification enzyme, an RNA-binding protein, a translation initiation factor, an RNA splicing factor, etc.). A heterologous nucleic acid sequence may be linked to another nucleic acid sequence (e.g., by genetic engineering) to generate a chimeric nucleotide sequence encoding a chimeric polypeptide.

[0318] A subject Cas9 fusion polypeptide (Cas9 fusion protein) can have multiple (1 or more, 2 or more, 3 or more, etc.) fusion partners in any combination of the above. As an illustrative example, a Cas9 fusion protein can have a heterologous sequence that provides an activity (e.g., for transcription modulation, target modification, modification of a protein associated with a target nucleic acid, etc.) and can also have a subcellular localization sequence. In some cases, such a Cas9 fusion protein might also have a tag for ease of tracking and/or purification (e.g., green fluorescent protein (GFP), YFP, RFP, CFP, mCherry, tdTomato, and the like; a histidine tag, e.g., a 6×His tag; a hemagglutinin (HA) tag; a FLAG tag; a Myc tag; and the like). As another illustrative example, a Cas9 protein can have one or more NLSs (e.g., two or more, three or more, four or more, five or more, 1, 2, 3, 4, or 5 NLSs). In some cases a fusion partner (or multiple fusion partners) (e.g., an NLS, a tag, a fusion partner providing an activity, etc.) is located at or near the C-terminus of Cas9. In some cases a fusion partner (or multiple fusion partners) (e.g., an NLS, a tag, a fusion partner providing an activity, etc.) is located at the N-terminus of Cas9. In some cases a Cas9 has a fusion partner (or multiple fusion partners)(e.g., an NLS, a tag, a fusion partner providing an activity, etc.) at both the N-terminus and C-terminus.

[0319] Suitable fusion partners that provide for increased or decreased stability include, but are not limited to degron sequences. Degrons are readily understood by one of ordinary skill in the art to be amino acid sequences that control the stability of the protein of which they are part. For example, the stability of a protein comprising a degron sequence is controlled in part by the degron sequence. In some cases, a suitable degron is constitutive such that the degron exerts its influence on protein stability independent of experimental control (i.e., the degron is not drug inducible, temperature inducible, etc.) In some cases, the degron provides the variant Cas9 polypeptide with controllable stability such that the variant Cas9 polypeptide can be turned “on” (i.e., stable) or “off” (i.e., unstable, degraded) depending on the desired conditions. For example, if the degron is a temperature sensitive degron, the variant Cas9 polypeptide may be functional (i.e., “on”, stable) below a threshold temperature (e.g., 42° C., 41° C., 40° C., 39° C., 38° C., 37° C., 36° C., 35° C., 34° C., 33° C., 32° C., 31° C., 30° C., etc.) but non-functional (i.e., “off”, degraded) above the threshold temperature. As another example, if the degron is a drug inducible degron, the presence or absence of drug can switch the protein from an “off” (i.e., unstable) state to an “on” (i.e., stable) state or vice versa. An exemplary drug inducible degron is derived from the FKBP12 protein. The stability of the degron is controlled by the presence or absence of a small molecule that binds to the degron.

[0320] Examples of suitable degrons include, but are not limited to those degrons controlled by Shield-1, DHFR, auxins, and/or temperature. Non-limiting examples of suitable degrons are known in the art (e.g., Dohmen et al., Science, 1994. 263(5151): p. 1273-1276: Heat-inducible degron: a method for constructing temperature-sensitive mutants; Schoeber et al., Am J Physiol Renal Physiol. 2009 January; 296(1):F204-11: Conditional fast expression and function of multimeric TRPV5 channels using Shield-1; Chu et al., Bioorg Med Chem Lett. 2008 Nov. 15; 18(22):5941-4: Recent progress with FKBP-derived destabilizing domains; Kanemaki, Pflugers Arch. 2012 Dec. 28: Frontiers of protein expression control with conditional degrons; Yang et al., Mol Cell. 2012 Nov. 30; 48(4):487-8: Titivated for destruction: the methyl degron; Barbour et al., Biosci Rep. 2013 Jan. 18; 33(1).: Characterization of the bipartite degron that regulates ubiquitin-independent degradation of thymidylate synthase; and Greussing et al., J Vis Exp. 2012 Nov. 10; (69): Monitoring of ubiquitin-proteasome activity in living cells using a Degron (dgn)-destabilized green fluorescent protein (GFP)-based reporter protein; all of which are hereby incorporated in their entirety by reference).

[0321] Exemplary degron sequences have been well-characterized and tested in both cells and animals. Thus, fusing Cas9 (e.g., wild type Cas9; variant Cas9; variant Cas9 with reduced nuclease activity, e.g., dCas9; and the like) to a degron sequence produces a “tunable” and “inducible” Cas9 polypeptide. Any of the fusion partners described herein can be used in any desirable combination. As one non-limiting example to illustrate this point, a Cas9 fusion protein (i.e., a chimeric Cas9 polypeptide) can comprise a YFP sequence for detection, a degron sequence for stability, and transcription activator sequence to increase transcription of the target nucleic acid. A suitable reporter protein for use as a fusion partner for a Cas9 polypeptide (e.g., wild type Cas9, variant Cas9, variant Cas9 with reduced nuclease function, etc.), includes, but is not limited to, the following exemplary proteins (or functional fragment thereof): his3, β-galatosidase, a fluorescent protein (e.g., GFP, RFP, YFP, cherry, tomato, etc., and various derivatives thereof), luciferase, β-glucuronidase, and alkaline phosphatase. Furthermore, the number of fusion partners that can be used in a Cas9 fusion protein is unlimited. In some cases, a Cas9 fusion protein comprises one or more (e.g. two or more, three or more, four or more, or five or more) heterologous sequences.

[0322] Suitable fusion partners include, but are not limited to, a polypeptide that provides for methyltransferase activity, demethylase activity, acetyltransferase activity, deacetylase activity, kinase activity, phosphatase activity, ubiquitin ligase activity, deubiquitinating activity, adenylation activity, deadenylation activity, SUMOylating activity, deSUMOylating activity, ribosylation activity, deribosylation activity, myristoylation activity, or demyristoylation activity, any of which can be directed at modifying nucleic acid directly (e.g., methylation of DNA or RNA) or at modifying a nucleic acid-associated polypeptide (e.g., a histone, a DNA binding protein, and RNA binding protein, and the like). Further suitable fusion partners include, but are not limited to boundary elements (e.g., CTCF), proteins and fragments thereof that provide periphery recruitment (e.g., Lamin A, Lamin B, etc.), and protein docking elements (e.g., FKBP/FRB, Pil1/Aby1, etc.).

[0323] Examples of various additional suitable fusion partners (or fragments thereof) for a subject variant Cas9 polypeptide include, but are not limited to those listed in FIG. 15 and are also described in the PCT patent applications: WO2010075303, WO2012068627, and WO2013155555 which are hereby incorporated by reference in their entirety.

[0324] Suitable fusion partners include, but are not limited to, a polypeptide that provides an activity that indirectly increases transcription by acting directly on the target nucleic acid or on a polypeptide (e.g., a histone, a DNA-binding protein, an RNA-binding protein, an RNA editing protein, etc.) associated with the target nucleic acid. Suitable fusion partners include, but are not limited to, a polypeptide that provides for methyltransferase activity, demethylase activity, acetyltransferase activity, deacetylase activity, kinase activity, phosphatase activity, ubiquitin ligase activity, deubiquitinating activity, adenylation activity, deadenylation activity, SUMOylating activity, deSUMOylating activity, ribosylation activity, deribosylation activity, myristoylation activity, or demyristoylation activity.

[0325] Additional suitable fusion partners include, but are not limited to, a polypeptide that directly provides for increased transcription and/or translation of a target nucleic acid (e.g., a transcription activator or a fragment thereof, a protein or fragment thereof that recruits a transcription activator, a small molecule/drug-responsive transcription and/or translation regulator, a translation-regulating protein, etc.).

[0326] Non-limiting examples of fusion partners to accomplish increased or decreased transcription are listed in FIG. 15B-D and include transcription activator and transcription repressor domains (e.g., the \ddot{K}ruppel associated box (KRAB or SKD); the Mad mSIN3 interaction domain (SID); the ERF repressor domain (ERD), etc). In some such cases, a Cas9 fusion protein is targeted by the guide nucleic acid to a specific location (i.e., sequence) in the target nucleic acid and exerts locus-specific regulation such as blocking RNA polymerase binding to a promoter (which selectively inhibits transcription activator function), and/or modifying the local chromatin status (e.g., when a fusion sequence is used that modifies the target nucleic acid or modifies a polypeptide associated with the target nucleic acid). In some cases, the changes are transient (e.g., transcription repression or activation). In some cases, the changes are inheritable (e.g., when epigenetic modifications are made to the target nucleic acid or to proteins associated with the target nucleic acid, e.g., nucleosomal histones).

[0327] Non-limiting examples of fusion partners for use when targeting ssRNA target nucleic acids are listed in FIG. 15A and include (but are not limited to): splicing factors (e.g., RS domains); protein translation components (e.g., translation initiation, elongation, and/or release factors; e.g., eIF4G); RNA methylases; RNA editing enzymes (e.g., RNA deaminases, e.g., adenosine deaminase acting on RNA (ADAR), including A to I and/or C to U editing enzymes); helicases; RNA-binding proteins; and the like. It is understood that a fusion partner can include the entire protein or in some cases can include a fragment of the protein (e.g., a functional domain).

[0328] In some embodiments, the heterologous sequence can be fused to the C-terminus of the Cas9 polypeptide. In some embodiments, the heterologous sequence can be fused to the N-terminus of the Cas9 polypeptide. In some embodiments, the heterologous sequence can be fused to an internal portion (i.e., a portion other than the N- or C-terminus) of the Cas9 polypeptide.

[0329] In addition to the fusion partners listed in FIG. 15A the fusion partner of a chimeric Cas9 polypeptide can be any domain capable of interacting with ssRNA (which, for the purposes of this disclosure, includes intramolecular and/or intermolecular secondary structures, e.g., double-stranded RNA duplexes such as hairpins, stem-loops, etc.), whether transiently or irreversibly, directly or indirectly, including but not limited to an effector domain selected from the group comprising; Endonucleases (for example RNase III, the CRR22 DYW domain, Dicer, and PIN (PilT N-terminus) domains from proteins such as SMG5 and SMG6); proteins and protein domains responsible for stimulating RNA cleavage (for example CPSF, CstF, CFIm and CFIIm); Exonucleases (for example XRN-1 or Exonuclease T); Deadenylases (for example HNT3); proteins and protein domains responsible for nonsense mediated RNA decay (for example UPF1, UPF2, UPF3, UPF3b, RNP S1, Y14, DEK, REF2, and SRm160); proteins and protein domains responsible for stabilizing RNA (for example PABP); proteins and protein domains responsible for repressing translation (for example Ago2 and Ago4); proteins and protein domains responsible for stimulating translation (for example Staufen); proteins and protein domains responsible for (e.g., capable of) modulating translation (e.g., translation factors such as initiation factors, elongation factors, release factors, etc., e.g., eIF4G); proteins and protein domains responsible for polyadenylation of RNA (for example PAP1, GLD-2, and Star-PAP); proteins and protein domains responsible for polyuridinylation of RNA (for example CI D1 and terminal uridylate transferase); proteins and protein domains responsible for RNA localization (for example from IMP1, ZBP1, She2p, She3p, and Bicaudal-D); proteins and protein domains responsible for nuclear retention of RNA (for example Rrp6); proteins and protein domains responsible for nuclear export of RNA (for example TAP, NXF1, THO, TREX, REF, and Aly); proteins and protein domains responsible for repression of RNA splicing (for example PTB, Sam68, and hnRNP A1); proteins and protein domains responsible for stimulation of RNA splicing (for example Serine/Arginine-rich (SR) domains); proteins and protein domains responsible for reducing the efficiency of transcription (for example FUS (TLS)); and proteins and protein domains responsible for stimulating transcription (for example CDK7 and HIV Tat). Alternatively, the effector domain may be selected from the group comprising Endonucleases; proteins and protein domains capable of stimulating RNA cleavage; Exonucleases; Deadenylases; proteins and protein domains having nonsense mediated RNA decay activity; proteins and protein domains capable of stabilizing RNA; proteins and protein domains capable of repressing translation; proteins and protein domains capable of stimulating translation; proteins and protein domains capable of modulating translation (e.g., translation factors such as initiation factors, elongation factors, release factors, etc., e.g., eIF4G); proteins and protein domains capable of polyadenylation of RNA; proteins and protein domains capable of polyuridinylation of RNA; proteins and protein domains having RNA localization activity; proteins and protein domains capable of nuclear retention of RNA; proteins and protein domains having RNA nuclear export activity; proteins and protein domains capable of repression of RNA splicing; proteins and protein domains capable of stimulation of RNA splicing; proteins and protein domains capable of reducing the efficiency of transcription; and proteins and protein domains capable of stimulating transcription. Another suitable fusion partner is a PUF RNA-binding domain, which is described in more detail in WO2012068627.

[0330] Some RNA splicing factors that can be used (in whole or as fragments thereof) as fusion partners for a Cas9 polypeptide have modular organization, with separate sequence-specific RNA binding modules and splicing effector domains. For example, members of the Serine/Arginine-rich (SR) protein family contain N-terminal RNA recognition motifs (RRMs) that bind to exonic splicing enhancers (ESEs) in pre-mRNAs and C-terminal RS domains that promote exon inclusion. As another example, the hnRNP protein hnRNP Al binds to exonic splicing silencers (ESSs) through its RRM domains and inhibits exon inclusion through a C-terminal Glycine-rich domain. Some splicing factors can regulate alternative use of splice site (ss) by binding to regulatory sequences between the two alternative sites. For example, ASF/SF2 can recognize ESEs and promote the use of intron proximal sites, whereas hnRNP Al can bind to ESSs and shift splicing towards the use of intron distal sites. One application for such factors is to generate ESFs that modulate alternative splicing of endogenous genes, particularly disease associated genes. For example, Bcl-x pre-mRNA produces two splicing isoforms with two alternative 5′ splice sites to encode proteins of opposite functions. The long splicing isoform Bcl-xL is a potent apoptosis inhibitor expressed in long-lived postmitotic cells and is up-regulated in many cancer cells, protecting cells against apoptotic signals. The short isoform Bcl-xS is a pro-apoptotic isoform and expressed at high levels in cells with a high turnover rate (e.g., developing lymphocytes). The ratio of the two Bcl-x splicing isoforms is regulated by multiple c\acute{ω}-elements that are located in either the core exon region or the exon extension region (i.e., between the two alternative 5′ splice sites). For more examples, see WO2010075303.

[0331] In some embodiments, a Cas9 polypeptide (e.g., a wild type Cas9, a variant Cas9, a variant Cas9 with reduced nuclease activity, etc.) can be linked to a fusion partner via a peptide spacer.

[0332] Nucleic Acids Encoding a PAMmer and/or a Guide Nucleic Acid, and/or a Cas9 Polypeptide

[0333] The present disclosure provides compositions and methods that include a PAMmer and at least one of: a guide nucleic acid, and a Cas9 polypeptide (e.g., a wild type Cas9 polypeptide, a variant Cas9 polypeptide, a chimeric Cas9 polypeptide, and the like). In some cases, a subject PAMmer, and/or guide nucleic acid, and/or a Cas9 polypeptide is provided as a nucleic acid encoding one or more of a PAMmer and/or guide nucleic acid, and/or a Cas9 polypeptide. In some embodiments, a subject nucleic acid is an expression vector, e.g., a recombinant expression vector. As such, In some embodiments, a subject method involves contacting a target nucleic acid (e.g., a single stranded target nucleic acid) or introducing into a cell (or a population of cells) a PAMmer (or a nucleic acid comprising a nucleotide sequence encoding a PAMmer) and at least one of: a guide nucleic acid (or a nucleic acid comprising a nucleotide sequence encoding a guide nucleic acid), and a Cas9 polypeptide (or a nucleic acid comprising a nucleotide sequence encoding a Cas9 polypeptide). In some embodiments a cell comprising a target nucleic acid is in vitro and/or ex vivo. In some embodiments a cell comprising a target nucleic acid is in vivo. Suitable nucleic acids comprising nucleotide sequences encoding a PAMmer, a guide nucleic acid, and/or a Cas9 polypeptide include expression vectors, where an expression vector comprising a nucleotide sequence encoding a PAMmer and/or a guide nucleic acid and/or a Cas9 polypeptide is a “recombinant expression vector.”

[0334] In some embodiments, the recombinant expression vector is a viral construct, e.g., a recombinant adeno-associated virus construct (see, e.g., U.S. Pat. No. 7,078,387), a recombinant adenoviral construct, a recombinant lentiviral construct, a recombinant retroviral construct, etc.

[0335] Suitable expression vectors include, but are not limited to, viral vectors (e.g. viral vectors based on vaccinia virus; poliovirus; adenovirus (see, e.g., Li et al., Invest Opthalmol Vis Sci 35:2543 2549, 1994; Borras et al., Gene Ther 6:515 524, 1999; Li and Davidson, PNAS 92:7700 7704, 1995; Sakamoto et al., H Gene Ther 5:1088 1097, 1999; WO 94/12649, WO 93/03769; WO 93/19191; WO 94/28938; WO 95/11984 and WO 95/00655); adeno-associated virus (see, e.g., Ali et al., Hum Gene Ther 9:81 86, 1998, Flannery et al., PNAS 94:6916 6921, 1997; Bennett et al., Invest Opthalmol Vis Sci 38:2857 2863, 1997; Jomary et al., Gene Ther 4:683 690, 1997, Rolling et al., Hum Gene Ther 10:641 648, 1999; Ali et al., Hum Mol Genet 5:591 594, 1996; Srivastava in WO 93/09239, Samulski et al., J. Vir. (1989) 63:3822-3828; Mendelson et al., Virol. (1988) 166:154-165; and Flotte et al., PNAS (1993) 90:10613-10617); SV40; herpes simplex virus; human immunodeficiency virus (see, e.g., Miyoshi et al., PNAS 94:10319 23, 1997; Takahashi et al., J Virol 73:7812 7816, 1999); a retroviral vector (e.g., Murine Leukemia Virus, spleen necrosis virus, and vectors derived from retroviruses such as Rous Sarcoma Virus, Harvey Sarcoma Virus, avian leukosis virus, a lentivirus, human immunodeficiency virus, myeloproliferative sarcoma virus, and mammary tumor virus); and the like.

[0336] Numerous suitable expression vectors are known to those of skill in the art, and many are commercially available. The following vectors are provided by way of example; for eukaryotic host cells: pXT1, pSG5 (Stratagene), pSVK3, pBPV, pMSG, and pSVLSV40 (Pharmacia). However, any other vector may be used so long as it is compatible with the host cell.

[0337] Depending on the host/vector system utilized, any of a number of suitable transcription and translation control elements, including constitutive and inducible promoters, transcription enhancer elements, transcription terminators, etc. may be used in the expression vector (see e.g., Bitter et al. (1987) Methods in Enzymology, 153:516-544).

[0338] In some embodiments, a nucleotide sequence encoding a PAMmer, and/or a guide nucleic acid and/or a Cas9 polypeptide is operably linked to a control element, e.g., a transcriptional control element, such as a promoter. The transcriptional control element may be functional in either a eukaryotic cell, e.g., a mammalian cell; or a prokaryotic cell (e.g., bacterial or archaeal cell). In some embodiments, a nucleotide sequence encoding a PAMmer, and/or a guide nucleic acid and/or a Cas9 polypeptide is operably linked to multiple control elements that allow expression of the nucleotide sequence encoding a PAMmer, and/or a guide nucleic acid and/or a Cas9 polypeptide in both prokaryotic and eukaryotic cells.

[0339] Non-limiting examples of suitable eukaryotic promoters (promoters functional in a eukaryotic cell) include those from cytomegalovirus (CMV) immediate early, herpes simplex virus (HSV) thymidine kinase, early and late SV40, long terminal repeats (LTRs) from retrovirus, and mouse metallothionein-I. Selection of the appropriate vector and promoter is well within the level of ordinary skill in the art. The expression vector may also contain a ribosome binding site for translation initiation and a transcription terminator. The expression vector may also include appropriate sequences for amplifying expression. The expression vector may also include nucleotide sequences encoding protein tags (e.g., 6×His tag, hemagglutinin tag, green fluorescent protein, etc.) that are fused to the Cas9 polypeptide, thus resulting in a chimeric polypeptide.

[0340] In some embodiments, a nucleotide sequence encoding a guide nucleic acid and/or a Cas9 polypeptide is operably linked to an inducible promoter. In some embodiments, a nucleotide sequence encoding a guide nucleic acid and/or a Cas9 polypeptide is operably linked to a constitutive promoter.

[0341] A promoter can be a constitutively active promoter (i.e., a promoter that is constitutively in an active/“ON” state), it may be an inducible promoter (i.e., a promoter whose state, active/“ON” or inactive/“OFF”, is controlled by an external stimulus, e.g., the presence of a particular temperature, compound, or protein.), it may be a spatially restricted promoter (i.e., transcriptional control element, enhancer, etc.)(e.g., tissue specific promoter, cell type specific promoter, etc.), and it may be a temporally restricted promoter (i.e., the promoter is in the “ON” state or “OFF” state during specific stages of embryonic development or during specific stages of a biological process, e.g., hair follicle cycle in mice).

[0342] Suitable promoters can be derived from viruses and can therefore be referred to as viral promoters, or they can be derived from any organism, including prokaryotic or eukaryotic organisms. Suitable promoters can be used to drive expression by any RNA polymerase (e.g., pol I, pol II, pol III). Exemplary promoters include, but are not limited to the SV40 early promoter, mouse mammary tumor virus long terminal repeat (LTR) promoter; adenovirus major late promoter (Ad MLP); a herpes simplex virus (HSV) promoter, a cytomegalovirus (CMV) promoter such as the CMV immediate early promoter region (CMVIE), a rous sarcoma virus (RSV) promoter, a human U6 small nuclear promoter (U6) (Miyagishi et al., Nature Biotechnology 20, 497-500 (2002)), an enhanced U6 promoter (e.g., Xia et al., Nucleic Acids Res. 2003 Sep. 1; 31(17)), a human H1 promoter (H1), and the like.

[0343] Examples of inducible promoters include, but are not limited toT7 RNA polymerase promoter, T3 RNA polymerase promoter, Isopropyl-beta-D-thiogalactopyranoside (IPTG)-regulated promoter, lactose induced promoter, heat shock promoter, Tetracycline-regulated promoter, Steroid-regulated promoter, Metal-regulated promoter, estrogen receptor-regulated promoter, etc. Inducible promoters can therefore be regulated by molecules including, but not limited to, doxycycline; RNA polymerase, e.g., T7 RNA polymerase; an estrogen receptor; an estrogen receptor fusion; etc.

[0344] In some embodiments, the promoter is a spatially restricted promoter (i.e., cell type specific promoter, tissue specific promoter, etc.) such that in a multi-cellular organism, the promoter is active (i.e., “ON”) in a subset of specific cells. Spatially restricted promoters may also be referred to as enhancers, transcriptional control elements, control sequences, etc. Any convenient spatially restricted promoter may be used and the choice of suitable promoter (e.g., a brain specific promoter, a promoter that drives expression in a subset of neurons, a promoter that drives expression in the germline, a promoter that drives expression in the lungs, a promoter that drives expression in muscles, a promoter that drives expression in islet cells of the pancreas, etc.) will depend on the organism. For example, various spatially restricted promoters are known for plants, flies, worms, mammals, mice, etc. Thus, a spatially restricted promoter can be used to regulate the expression of a nucleic acid encoding a subject Cas9 polypeptide in a wide variety of different tissues and cell types, depending on the organism. Some spatially restricted promoters are also temporally restricted such that the promoter is in the “ON” state or “OFF” state during specific stages of embryonic development or during specific stages of a biological process (e.g., hair follicle cycle in mice).

[0345] For illustration purposes, examples of spatially restricted promoters include, but are not limited to, neuron-specific promoters, adipocyte-specific promoters, cardiomyocyte-specific promoters, smooth muscle-specific promoters, photoreceptor-specific promoters, etc. Neuron-specific spatially restricted promoters include, but are not limited to, a neuron-specific enolase (NSE) promoter (see, e.g., EMBL HSENO2, X51956); an aromatic amino acid decarboxylase (AADC) promoter; a neurofilament promoter (see, e.g., GenBank HUMNFL, L04147); a synapsin promoter (see, e.g., GenBank HUMSYNIB, M55301); a thy-1 promoter (see, e.g., Chen et al. (1987) Cell 51:7-19; and Llewellyn, et al. (2010) Nat. Med. 16(10):1161-1166); a serotonin receptor promoter (see, e.g., GenBank S62283); a tyrosine hydroxylase promoter (TH) (see, e.g., Oh et al. (2009) Gene Ther 16:437; Sasaoka et al. (1992) Mol. Brain Res. 16:274; Boundy et al. (1998) J. Neurosci. 18:9989; and Kaneda et al. (1991) Neuron 6:583-594); a GnRH promoter (see, e.g., Radovick et al. (1991) Proc. Natl. Acad. Sci. USA 88:3402-3406); an L7 promoter (see, e.g., Oberdick et al. (1990) Science 248:223-226); a DNMT promoter (see, e.g., Bartge et al. (1988) Proc. Natl. Acad. Sci. USA 85:3648-3652); an enkephalin promoter (see, e.g., Comb et al. (1988) EMBO J. 17:3793-3805); a myelin basic protein (MBP) promoter; a Ca2+−calmodulin-dependent protein kinase II-alpha (CamKIIα) promoter (see, e.g., Mayford et al. (1996) Proc. Natl. Acad. Sci. USA 93:13250; and Casanova et al. (2001) Genesis 31:37); a CMV enhancer/platelet-derived growth factor-β promoter (see, e.g., Liu et al. (2004) Gene Therapy 11:52-60); and the like.

[0346] Adipocyte-specific spatially restricted promoters include, but are not limited to aP2 gene promoter/enhancer, e.g., a region from −5.4 kb to +21 bp of a human aP2 gene (see, e.g., Tozzo et al. (1997) Endocrinol. 138:1604; Ross et al. (1990) Proc. Natl. Acad. Sci. USA 87:9590; and Pavjani et al. (2005) Nat. Med. 11:797); a glucose transporter-4 (GLUT4) promoter (see, e.g., Knight et al. (2003) Proc. Natl. Acad. Sci. USA 100:14725); a fatty acid translocase (FAT/CD36) promoter (see, e.g., Kuriki et al. (2002) Biol. Pharm. Bull. 25:1476; and Sato et al. (2002) J. Biol. Chem. 277:15703); a stearoyl-CoA desaturase-1 (SCD1) promoter (Tabor et al. (1999) J. Biol. Chem. 274:20603); a leptin promoter (see, e.g., Mason et al. (1998) Endocrinol. 139:1013; and Chen et al. (1999) Biochem. Biophys. Res. Comm. 262:187); an adiponectin promoter (see, e.g., Kita et al. (2005) Biochem. Biophys. Res. Comm. 331:484; and Chakrabarti (2010) Endocrinol. 151:2408); an adipsin promoter (see, e.g., Platt et al. (1989) Proc. Natl. Acad. Sci. USA 86:7490); a resistin promoter (see, e.g., Seo et al. (2003) Molec. Endocrinol. 17:1522); and the like.

[0347] Cardiomyocyte-specific spatially restricted promoters include, but are not limited to control sequences derived from the following genes: myosin light chain-2, α-myosin heavy chain, AE3, cardiac troponin C, cardiac actin, and the like. Franz et al. (1997) Cardiovasc. Res. 35:560-566; Robbins et al. (1995) Ann. N.Y. Acad. Sci. 752:492-505; Linn et al. (1995) Circ. Res. 76:584-591; Parmacek et al. (1994) Mol. Cell. Biol. 14:1870-1885; Hunter et al. (1993) Hypertension 22:608-617; and Sartorelli et al. (1992) Proc. Natl. Acad. Sci. USA 89:4047-4051.

[0348] Smooth muscle-specific spatially restricted promoters include, but are not limited to an SM22a promoter (see, e.g., Akyürek et al. (2000) Mol. Med. 6:983; and U.S. Pat. No. 7,169,874); a smoothelin promoter (see, e.g., WO 2001/018048); an α-smooth muscle actin promoter; and the like. For example, a 0.4 kb region of the SM22α promoter, within which lie two CArG elements, has been shown to mediate vascular smooth muscle cell-specific expression (see, e.g., Kim, et al. (1997) Mol. Cell. Biol. 17, 2266-2278; Li, et al., (1996) J. Cell Biol. 132, 849-859; and Moessler, et al. (1996) Development 122, 2415-2425).

[0349] Photoreceptor-specific spatially restricted promoters include, but are not limited to, a rhodopsin promoter; a rhodopsin kinase promoter (Young et al. (2003) Ophthalmol. Vis. Sci. 44:4076); a beta phosphodiesterase gene promoter (Nicoud et al. (2007) J. Gene Med. 9:1015); a retinitis pigmentosa gene promoter (Nicoud et al. (2007) supra); an interphotoreceptor retinoid-binding protein (IRBP) gene enhancer (Nicoud et al. (2007) supra); an IRBP gene promoter (Yokoyama et al. (1992) Exp Eye Res. 55:225); and the like.

[0350] Methods of introducing a nucleic acid into a host cell are known in the art, and any known method can be used to introduce a nucleic acid (e.g., an expression construct) into a cell. Suitable methods include e.g., viral or bacteriophage infection, transfection, conjugation, protoplast fusion, lipofection, electroporation, calcium phosphate precipitation, polyethyleneimine (PEI)-mediated transfection, DEAE-dextran mediated transfection, liposome-mediated transfection, particle gun technology, calcium phosphate precipitation, direct micro injection, nanoparticle-mediated nucleic acid delivery (see, e.g., Panyam et., al Adv Drug Deliv Rev. 2012 Sep. 13. pii: 50169-409X(12)00283-9. doi: 10.1016/j.addr.2012.09.023), and the like.

[0351] Contacting cells with a PAMmer, and/or guide nucleic acid, and/or Cas9 polypeptide may occur in any culture media and under any culture conditions that promote the survival of the cells. For example, cells may be suspended in any appropriate nutrient medium that is convenient, such as Iscove's modified DMEM or RPMI 1640, supplemented with fetal calf serum or heat inactivated goat serum (about 5-10%), L-glutamine, a thiol, particularly 2-mercaptoethanol, and antibiotics, e.g. penicillin and streptomycin. The culture may contain growth factors to which the cells are responsive. Growth factors, as defined herein, are molecules capable of promoting survival, growth and/or differentiation of cells, either in culture or in the intact tissue, through specific effects on a transmembrane receptor. Growth factors include polypeptides and non-polypeptide factors. Conditions that promote the survival of cells are typically permissive of the subject cleavage and binding methods

[0352] In some embodiments, a Cas9 polypeptide can be codon optimized. In some cases, a codon optimized Cas9 polypeptide is a variant Cas9 polypeptide. In some cases, a codon optimized Cas9 polypeptide is a chimeric Cas9 polypeptide. Codon optimization is known in the art and entails the mutation of foreign-derived DNA to mimic the codon preferences of the intended host organism or host cell while encoding the same protein. Thus, the codons are changed, but the encoded protein remains unchanged. For example, if the intended target cell was a human cell, a human codon optimized Cas9 (or Cas9 variant) would be a suitable Cas9 polypeptide. As another non-limiting example, if the intended host cell were a mouse cell, than a mouse codon optimized Cas9 (or variant, e.g., enzymatically inactive variant) would be a suitable Cas9 polypeptide. While codon optimization is not required, it is acceptable and may be preferable in certain cases.

[0353] In some embodiments, a guide nucleic acid and/or a Cas9 polypeptide and/or PAMmer can be provided as RNA. In such cases, the guide nucleic acid and/or the RNA encoding the Cas9 polypeptide and/or the PAMmer can be produced by direct chemical synthesis or may be transcribed in vitro from a DNA (e.g., encoding the guide nucleic acid, the PAMmer, and/or the Cas9 polypeptide). Methods of synthesizing RNA from a DNA template are well known in the art. In some cases, the guide nucleic acid and/or the PAMmer and/or the RNA encoding the Cas9 polypeptide will be synthesized in vitro using an RNA polymerase enzyme (e.g., T7 polymerase, T3 polymerase, SP6 polymerase, etc.). Once synthesized, the RNA may directly contact a target nucleic acid or may be introduced into a cell by any of the well-known techniques for introducing nucleic acids into cells (e.g., microinjection, electroporation, transfection, etc). In some cases, a PAMmer is a DNA oligonucleotide and can produced using any convenient method (e.g., chemical synthesis).

[0354] Nucleotides encoding a guide nucleic acid (introduced either as DNA or RNA) and/or a Cas9 polypeptide (introduced as DNA or RNA) and/or a PAMmer (introduced either as DNA or RNA) may be provided to the cells using well-developed transfection techniques; see, e.g. Angel and Yanik (2010) PLoS ONE 5(7): e11756, and the commercially available TransMessenger® reagents from Qiagen, Stemfect™ RNA Transfection Kit from Stemgent, and TransIT®-mRNA Transfection Kit from Mirus Bio LLC. See also Beumer et al. (2008) Efficient gene targeting in Drosophila by direct embryo injection with zinc-finger nucleases. PNAS 105(50):19821-19826. Alternatively, nucleic acids encoding a guide nucleic acid and/or a Cas9 polypeptide and/or a chimeric Cas9 polypeptide and/or a PAMmer may be provided on DNA vectors. Many vectors, e.g. plasmids, cosmids, minicircles, phage, viruses, etc., useful for transferring nucleic acids into target cells are available. The vectors comprising the nucleic acid(s) may be maintained episomally, e.g. as plasmids, minicircle DNAs, viruses such cytomegalovirus, adenovirus, etc., or they may be integrated into the target cell genome, through homologous recombination or random integration, e.g. retrovirus-derived vectors such as MMLV, HIV-1, ALV, etc.

[0355] Vectors may be provided directly to the subject cells. In other words, the cells are contacted with vectors comprising the nucleic acid encoding guide nucleic acid and/or a Cas9 polypeptide and/or a chimeric Cas9 polypeptide and/or a PAMmer such that the vectors are taken up by the cells. Methods for contacting cells with nucleic acid vectors that are plasmids, including electroporation, calcium chloride transfection, microinjection, and lipofection are well known in the art. For viral vector delivery, the cells are contacted with viral particles comprising the nucleic acid encoding a guide nucleic acid and/or a Cas9 polypeptide and/or a chimeric Cas9 polypeptide and/or a PAMmer. Retroviruses, for example, lentiviruses, are suitable for use in methods of the present disclosure. Commonly used retroviral vectors are “defective”, i.e. unable to produce viral proteins required for productive infection. Rather, replication of the vector requires growth in a packaging cell line. To generate viral particles comprising nucleic acids of interest, the retroviral nucleic acids comprising the nucleic acid are packaged into viral capsids by a packaging cell line. Different packaging cell lines provide a different envelope protein (ecotropic, amphotropic or xenotropic) to be incorporated into the capsid, this envelope protein determining the specificity of the viral particle for the cells (ecotropic for murine and rat; amphotropic for most mammalian cell types including human, dog and mouse; and xenotropic for most mammalian cell types except murine cells). The appropriate packaging cell line may be used to ensure that the cells are targeted by the packaged viral particles. Methods of introducing the retroviral vectors comprising the nucleic acid encoding the reprogramming factors into packaging cell lines and of collecting the viral particles that are generated by the packaging lines are well known in the art. Nucleic acids can also introduced by direct micro-injection (e.g., injection of RNA into a zebrafish embryo).

[0356] Vectors used for providing the nucleic acids encoding guide nucleic acid and/or a Cas9 polypeptide and/or a chimeric Cas9 polypeptide and/or a PAMmer to the subject cells will typically comprise suitable promoters for driving the expression, that is, transcriptional activation, of the nucleic acid of interest. In other words, the nucleic acid of interest will be operably linked to a promoter. This may include ubiquitously acting promoters, for example, the CMV-β-actin promoter, or inducible promoters, such as promoters that are active in particular cell populations or that respond to the presence of drugs such as tetracycline. By transcriptional activation, it is intended that transcription will be increased above basal levels in the target cell by 10 fold, by 100 fold, more usually by 1000 fold. In addition, vectors used for providing a guide nucleic acid and/or a Cas9 polypeptide and/or a chimeric Cas9 polypeptide and/or a PAMmer to the subject cells may include nucleic acid sequences that encode for selectable markers in the target cells, so as to identify cells that have taken up the guide nucleic acid and/or a Cas9 polypeptide and/or a chimeric Cas9 polypeptide and/or a PAMmer.

[0357] A subject guide nucleic acid and/or a Cas9 polypeptide and/or a chimeric Cas9 polypeptide may instead be used to contact DNA or introduced into cells as RNA. Methods of introducing RNA into cells are known in the art and may include, for example, direct injection, transfection, or any other method used for the introduction of DNA.

[0358] A subject Cas9 polypeptide may instead be provided to cells as a polypeptide. Such a polypeptide may optionally be fused to a polypeptide domain that increases solubility of the product. The domain may be linked to the polypeptide through a defined protease cleavage site, e.g. a TEV sequence, which is cleaved by TEV protease. The linker may also include one or more flexible sequences, e.g. from 1 to 10 glycine residues. In some embodiments, the cleavage of the fusion protein is performed in a buffer that maintains solubility of the product, e.g. in the presence of from 0.5 to 2 M urea, in the presence of polypeptides and/or polynucleotides that increase solubility, and the like. Domains of interest include endosomolytic domains, e.g. influenza HA domain; and other polypeptides that aid in production, e.g. IF2 domain, GST domain, GRPE domain, and the like. The polypeptide may be formulated for improved stability. For example, the peptides may be PEGylated, where the polyethyleneoxy group provides for enhanced lifetime in the blood stream.

[0359] Additionally or alternatively, the subject Cas9 polypeptide may be fused to a polypeptide permeant domain to promote uptake by the cell. A number of permeant domains are known in the art and may be used in the non-integrating polypeptides of the present disclosure, including peptides, peptidomimetics, and non-peptide carriers. For example, a permeant peptide may be derived from the third alpha helix of Drosophila melanogaster transcription factor Antennapaedia, referred to as penetratin, which comprises the amino acid sequence RQIKIWFQNRRMKWKK (SEQ ID NO:268). As another example, the permeant peptide comprises the HIV-1 tat basic region amino acid sequence, which may include, for example, amino acids 49-57 of naturally-occurring tat protein. Other permeant domains include polyarginine motifs, for example, the region of amino acids 34-56 of HIV-1 rev protein, nona-arginine, octa-arginine, and the like. (See, for example, Futaki et al. (2003) Curr Protein Pept Sci. 2003 April; 4(2): 87-9 and 446; and Wender et al. (2000) Proc. Natl. Acad. Sci. U.S.A 2000 Nov. 21; 97(24):13003-8; published U.S. Patent applications 20030220334; 20030083256; 20030032593; and 20030022831, herein specifically incorporated by reference for the teachings of translocation peptides and peptoids). The nona-arginine (R9) sequence is one of the more efficient PTDs that have been characterized (Wender et al. 2000; Uemura et al. 2002). The site at which the fusion is made may be selected in order to optimize the biological activity, secretion or binding characteristics of the polypeptide. The optimal site will be determined by routine experimentation.

[0360] A subject Cas9 polypeptide may be produced in vitro or by eukaryotic cells or by prokaryotic cells, and it may be further processed by unfolding, e.g. heat denaturation, DTT reduction, etc. and may be further refolded, using methods known in the art.

[0361] Modifications of interest that do not alter primary sequence include chemical derivatization of polypeptides, e.g., acylation, acetylation, carboxylation, amidation, etc. Also included are modifications of glycosylation, e.g. those made by modifying the glycosylation patterns of a polypeptide during its synthesis and processing or in further processing steps; e.g. by exposing the polypeptide to enzymes which affect glycosylation, such as mammalian glycosylating or deglycosylating enzymes. Also embraced are sequences that have phosphorylated amino acid residues, e.g. phosphotyrosine, phosphoserine, or phosphothreonine.

[0362] Also suitable for inclusion in embodiments of the present disclosure are guide nucleic acids, PAMmers, and Cas9 polypeptides that have been modified using ordinary molecular biological techniques and synthetic chemistry so as to improve their resistance to proteolytic degradation, to change the target sequence specificity, to optimize solubility properties, to alter protein activity (e.g., transcription modulatory activity, enzymatic activity, etc) or to render them more suitable as a therapeutic agent. Analogs of such polypeptides include those containing residues other than naturally occurring L-amino acids, e.g. D-amino acids or non-naturally occurring synthetic amino acids. D-amino acids may be substituted for some or all of the amino acid residues.

[0363] The Cas9 polypeptides may be prepared by in vitro synthesis, using conventional methods as known in the art. Various commercial synthetic apparatuses are available, for example, automated synthesizers by Applied Biosystems, Inc., Beckman, etc. By using synthesizers, naturally occurring amino acids may be substituted with unnatural amino acids. The particular sequence and the manner of preparation will be determined by convenience, economics, purity required, and the like.

[0364] If desired, various groups may be introduced into the peptide during synthesis or during expression, which allow for linking to other molecules or to a surface. Thus cysteines can be used to make thioethers, histidines for linking to a metal ion complex, carboxyl groups for forming amides or esters, amino groups for forming amides, and the like.

[0365] The Cas9 polypeptides may also be isolated and purified in accordance with conventional methods of recombinant synthesis. A lysate may be prepared of the expression host and the lysate purified using HPLC, exclusion chromatography, gel electrophoresis, affinity chromatography, or other purification technique. For the most part, the compositions which are used will comprise 20% or more by weight of the desired product, more usually 75% or more by weight, preferably 95% or more by weight, and for therapeutic purposes, usually 99.5% or more by weight, in relation to contaminants related to the method of preparation of the product and its purification. Usually, the percentages will be based upon total protein.

[0366] To induce cleavage or any desired modification to a target nucleic acid, or any desired modification to a polypeptide associated with target nucleic acid, the guide nucleic acid and/or the Cas9 polypeptide and/or the PAMmer, whether they be introduced as nucleic acids or polypeptides, are provided to the cells for about 30 minutes to about 24 hours, e.g., 1 hour, 1.5 hours, 2 hours, 2.5 hours, 3 hours, 3.5 hours 4 hours, 5 hours, 6 hours, 7 hours, 8 hours, 12 hours, 16 hours, 18 hours, 20 hours, or any other period from about 30 minutes to about 24 hours, which may be repeated with a frequency of about every day to about every 4 days, e.g., every 1.5 days, every 2 days, every 3 days, or any other frequency from about every day to about every four days. The agent(s) may be provided to the subject cells one or more times, e.g. one time, twice, three times, or more than three times, and the cells allowed to incubate with the agent(s) for some amount of time following each contacting event e.g. 16-24 hours, after which time the media is replaced with fresh media and the cells are cultured further.

[0367] In cases in which two or more different targeting complexes are provided to the cell (e.g., two different guide nucleic acids that are complementary to different sequences within the same or different target nucleic acid), the complexes may be provided simultaneously (e.g. as two polypeptides and/or nucleic acids), or delivered simultaneously. Alternatively, they may be provided consecutively, e.g. the targeting complex being provided first, followed by the second targeting complex, etc. or vice versa.

### Nucleic Acid Modifications

[0368] In some embodiments, a subject nucleic acid (e.g., a guide nucleic acid, a PAMmer, etc.) has one or more modifications, e.g., a base modification, a backbone modification, etc, to provide the nucleic acid with a new or enhanced feature (e.g., improved stability). A nucleoside is a base-sugar combination. The base portion of the nucleoside is normally a heterocyclic base. The two most common classes of such heterocyclic bases are the purines and the pyrimidines. Nucleotides are nucleosides that further include a phosphate group covalently linked to the sugar portion of the nucleoside. For those nucleosides that include a pentofuranosyl sugar, the phosphate group can be linked to the 2′, the 3′, or the 5′ hydroxyl moiety of the sugar. In forming oligonucleotides, the phosphate groups covalently link adjacent nucleosides to one another to form a linear polymeric compound. In turn, the respective ends of this linear polymeric compound can be further joined to form a circular compound, however, linear compounds are suitable. In addition, linear compounds may have internal nucleotide base complementarity and may therefore fold in a manner as to produce a fully or partially double-stranded compound. Within oligonucleotides, the phosphate groups are commonly referred to as forming the internucleoside backbone of the oligonucleotide. The normal linkage or backbone of RNA and DNA is a 3′ to 5′ phosphodiester linkage.

[0369] Suitable nucleic acid modifications include, but are not limited to: 2′Omethyl modified nucleotides, 2′ Fluoro modified nucleotides, locked nucleic acid (LNA) modified nucleotides, peptide nucleic acid (PNA) modified nucleotides, nucleotides with phosphorothioate linkages, and a 5′ cap (e.g., a 7-methylguanylate cap (m7G)). Additional details and additional modifications are described below.

[0370] In some cases, 2% or more of the nucleotides of a subject nucleic acid (e.g., a guide nucleic acid, a PAMmer, etc.) are modified (e.g., 3% or more, 5% or more, 7.5% or more, 10% or more, 15% or more, 20% or more, 25% or more, 30% or more, 35% or more, 40% or more, 45% or more, 50% or more, 55% or more, 60% or more, 65% or more, 75% or more, 80% or more, 85% or more, 90% or more, 95% or more, or 100% of the nucleotides of a subject nucleic acid are modified). In some cases, 2% or more of the nucleotides of a subject PAMmer are modified (e.g., 3% or more, 5% or more, 7.5% or more, 10% or more, 15% or more, 20% or more, 25% or more, 30% or more, 35% or more, 40% or more, 45% or more, 50% or more, 55% or more, 60% or more, 65% or more, 75% or more, 80% or more, 85% or more, 90% or more, 95% or more, or 100% of the nucleotides of a subject PAMmer are modified). In some cases, 2% or more of the nucleotides of a subject guide nucleic acid are modified (e.g., 3% or more, 5% or more, 7.5% or more, 10% or more, 15% or more, 20% or more, 25% or more, 30% or more, 35% or more, 40% or more, 45% or more, 50% or more, 55% or more, 60% or more, 65% or more, 75% or more, 80% or more, 85% or more, 90% or more, 95% or more, or 100% of the nucleotides of a subject guide nucleic acid are modified).

[0371] In some cases, the number of nucleotides of a subject nucleic acid nucleic acid (e.g., a guide nucleic acid, a PAMmer, etc.) that are modified is in a range of from 3% to 100% (e.g., 3% to 100%, 3% to 95%, 3% to 90%, 3% to 85%, 3% to 80%, 3% to 75%, 3% to 70%, 3% to 65%, 3% to 60%, 3% to 55%, 3% to 50%, 3% to 45%, 3% to 40%, 5% to 100%, 5% to 95%, 5% to 90%, 5% to 85%, 5% to 80%, 5% to 75%, 5% to 70%, 5% to 65%, 5% to 60%, 5% to 55%, 5% to 50%, 5% to 45%, 5% to 40%, 10% to 100%, 10% to 95%, 10% to 90%, 10% to 85%, 10% to 80%, 10% to 75%, 10% to 70%, 10% to 65%, 10% to 60%, 10% to 55%, 10% to 50%, 10% to 45%, or 10% to 40%). In some cases, the number of nucleotides of a subject PAMmer that are modified is in a range of from 3% to 100% (e.g., 3% to 100%, 3% to 95%, 3% to 90%, 3% to 85%, 3% to 80%, 3% to 75%, 3% to 70%, 3% to 65%, 3% to 60%, 3% to 55%, 3% to 50%, 3% to 45%, 3% to 40%, 5% to 100%, 5% to 95%, 5% to 90%, 5% to 85%, 5% to 80%, 5% to 75%, 5% to 70%, 5% to 65%, 5% to 60%, 5% to 55%, 5% to 50%, 5% to 45%, 5% to 40%, 10% to 100%, 10% to 95%, 10% to 90%, 10% to 85%, 10% to 80%, 10% to 75%, 10% to 70%, 10% to 65%, 10% to 60%, 10% to 55%, 10% to 50%, 10% to 45%, or 10% to 40%). In some cases, the number of nucleotides of a subject guide nucleic acid that are modified is in a range of from 3% to 100% (e.g., 3% to 100%, 3% to 95%, 3% to 90%, 3% to 85%, 3% to 80%, 3% to 75%, 3% to 70%, 3% to 65%, 3% to 60%, 3% to 55%, 3% to 50%, 3% to 45%, 3% to 40%, 5% to 100%, 5% to 95%, 5% to 90%, 5% to 85%, 5% to 80%, 5% to 75%, 5% to 70%, 5% to 65%, 5% to 60%, 5% to 55%, 5% to 50%, 5% to 45%, 5% to 40%, 10% to 100%, 10% to 95%, 10% to 90%, 10% to 85%, 10% to 80%, 10% to 75%, 10% to 70%, 10% to 65%, 10% to 60%, 10% to 55%, 10% to 50%, 10% to 45%, or 10% to 40%).

[0372] In some cases, one or more of the nucleotides of a subject nucleic acid (e.g., a guide nucleic acid, a PAMmer, etc.) are modified (e.g., 2 or more, 3 or more, 4 or more, 5 or more, 6 or more, 7 or more, 8 or more, 9 or more, 10 or more, 11 or more, 12 or more, 13 or more, 14 or more, 15 or more, 16 or more, 17 or more, 18 or more, 19 or more, 20 or more, 21 or more, 22 or more, or all of the nucleotides of a subject nucleic acid are modified). In some cases, one or more of the nucleotides of a subject PAMmer are modified (e.g., 2 or more, 3 or more, 4 or more, 5 or more, 6 or more, 7 or more, 8 or more, 9 or more, 10 or more, 11 or more, 12 or more, 13 or more, 14 or more, 15 or more, 16 or more, 17 or more, 18 or more, 19 or more, 20 or more, 21 or more, 22 or more, or all of the nucleotides of a subject PAMmer are modified). In some cases, one or more of the nucleotides of a subject guide nucleic acid are modified (e.g., 2 or more, 3 or more, 4 or more, 5 or more, 6 or more, 7 or more, 8 or more, 9 or more, 10 or more, 11 or more, 12 or more, 13 or more, 14 or more, 15 or more, 16 or more, 17 or more, 18 or more, 19 or more, 20 or more, 21 or more, 22 or more, or all of the nucleotides of a subject guide nucleic acid are modified).

[0373] In some cases, 99% or less of the nucleotides of a subject nucleic acid (e.g., a guide nucleic acid, a PAMmer, etc.) are modified (e.g., 99% or less, 95% or less, 90% or less, 85% or less, 80% or less, 75% or less, 70% or less, 65% or less, 60% or less, 55% or less, 50% or less, or 45% or less of the nucleotides of a subject nucleic acid are modified). In some cases, 99% or less of the nucleotides of a subject PAMmer are modified (e.g., e.g., 99% or less, 95% or less, 90% or less, 85% or less, 80% or less, 75% or less, 70% or less, 65% or less, 60% or less, 55% or less, 50% or less, or 45% or less of the nucleotides of a subject PAMmer are modified). In some cases, 99% or less of the nucleotides of a subject guide nucleic acid are modified (e.g., 99% or less, 95% or less, 90% or less, 85% or less, 80% or less, 75% or less, 70% or less, 65% or less, 60% or less, 55% or less, 50% or less, or 45% or less of the nucleotides of a subject guide nucleic acid are modified).

[0374] In some cases, the number of nucleotides of a subject nucleic acid nucleic acid (e.g., a guide nucleic acid, a PAMmer, etc.) that are modified is in a range of from 1 to 30 (e.g., 1 to 25, 1 to 20, 1 to 18, 1 to 15, 1 to 10, 2 to 25, 2 to 20, 2 to 18, 2 to 15, 2 to 10, 3 to 25, 3 to 20, 3 to 18, 3 to 15, or 3 to 10). In some cases, the number of nucleotides of a subject PAMmer that are modified is in a range of from 1 to 30 (e.g., 1 to 25, 1 to 20, 1 to 18, 1 to 15, 1 to 10, 2 to 25, 2 to 20, 2 to 18, 2 to 15, 2 to 10, 3 to 25, 3 to 20, 3 to 18, 3 to 15, or 3 to 10). In some cases, the number of nucleotides of a subject guide nucleic acid that are modified is in a range of from 1 to 30 (e.g., 1 to 25, 1 to 20, 1 to 18, 1 to 15, 1 to 10, 2 to 25, 2 to 20, 2 to 18, 2 to 15, 2 to 10, 3 to 25, 3 to 20, 3 to 18, 3 to 15, or 3 to 10).

[0375] In some cases, 20 or fewer of the nucleotides of a subject nucleic acid (e.g., a guide nucleic acid, a PAMmer, etc.) are modified (e.g., 19 or fewer, 18 or fewer, 17 or fewer, 16 or fewer, 15 or fewer, 14 or fewer, 13 or fewer, 12 or fewer, 11 or fewer, 10 or fewer, 9 or fewer, 8 or fewer, 7 or fewer, 6 or fewer, 5 or fewer, 4 or fewer, 3 or fewer, 2 or fewer, or one, of the nucleotides of a subject nucleic acid are modified). In some cases, 20 or fewer of the nucleotides of a subject PAMmer are modified (e.g., 19 or fewer, 18 or fewer, 17 or fewer, 16 or fewer, 15 or fewer, 14 or fewer, 13 or fewer, 12 or fewer, 11 or fewer, 10 or fewer, 9 or fewer, 8 or fewer, 7 or fewer, 6 or fewer, 5 or fewer, 4 or fewer, 3 or fewer, 2 or fewer, or one, of the nucleotides of a subject PAMmer are modified). In some cases, 20 or fewer of the nucleotides of a subject guide nucleic acid are modified (e.g., 19 or fewer, 18 or fewer, 17 or fewer, 16 or fewer, 15 or fewer, 14 or fewer, 13 or fewer, 12 or fewer, 11 or fewer, 10 or fewer, 9 or fewer, 8 or fewer, 7 or fewer, 6 or fewer, 5 or fewer, 4 or fewer, 3 or fewer, 2 or fewer, or one, of the nucleotides of a subject guide nucleic acid are modified).

[0376] A 2′-O-Methyl modified nucleotide (also referred to as 2′-O-Methyl RNA) is a naturally occurring modification of RNA found in tRNA and other small RNAs that arises as a post-transcriptional modification. Oligonucleotides can be directly synthesized that contain 2′-O-Methyl RNA. This modification increases Tm of RNA:RNA duplexes but results in only small changes in RNA:DNA stability. It is stable with respect to attack by single-stranded ribonucleases and is typically 5 to 10-fold less susceptible to DNases than DNA. It is commonly used in antisense oligos as a means to increase stability and binding affinity to the target message.

[0377] In some cases, 2% or more of the nucleotides of a subject nucleic acid (e.g., a guide nucleic acid, a PAMmer, etc.) are 2′-O-Methyl modified (e.g., 3% or more, 5% or more, 7.5% or more, 10% or more, 15% or more, 20% or more, 25% or more, 30% or more, 35% or more, 40% or more, 45% or more, 50% or more, 55% or more, 60% or more, 65% or more, 75% or more, 80% or more, 85% or more, 90% or more, 95% or more, or 100% of the nucleotides of a subject nucleic acid are 2′-O-Methyl modified). In some cases, 2% or more of the nucleotides of a subject PAMmer are 2′-O-Methyl modified (e.g., 3% or more, 5% or more, 7.5% or more, 10% or more, 15% or more, 20% or more, 25% or more, 30% or more, 35% or more, 40% or more, 45% or more, 50% or more, 55% or more, 60% or more, 65% or more, 75% or more, 80% or more, 85% or more, 90% or more, 95% or more, or 100% of the nucleotides of a subject PAMmer are 2′-O-Methyl modified). In some cases, 2% or more of the nucleotides of a subject guide nucleic acid are 2′-O-Methyl modified (e.g., 3% or more, 5% or more, 7.5% or more, 10% or more, 15% or more, 20% or more, 25% or more, 30% or more, 35% or more, 40% or more, 45% or more, 50% or more, 55% or more, 60% or more, 65% or more, 75% or more, 80% or more, 85% or more, 90% or more, 95% or more, or 100% of the nucleotides of a subject guide nucleic acid are 2′-O-Methyl modified).

[0378] In some cases, the number of nucleotides of a subject nucleic acid nucleic acid (e.g., a guide nucleic acid, a PAMmer, etc.) that are 2′-O-Methyl modified is in a range of from 3% to 100% (e.g., 3% to 100%, 3% to 95%, 3% to 90%, 3% to 85%, 3% to 80%, 3% to 75%, 3% to 70%, 3% to 65%, 3% to 60%, 3% to 55%, 3% to 50%, 3% to 45%, 3% to 40%, 5% to 100%, 5% to 95%, 5% to 90%, 5% to 85%, 5% to 80%, 5% to 75%, 5% to 70%, 5% to 65%, 5% to 60%, 5% to 55%, 5% to 50%, 5% to 45%, 5% to 40%, 10% to 100%, 10% to 95%, 10% to 90%, 10% to 85%, 10% to 80%, 10% to 75%, 10% to 70%, 10% to 65%, 10% to 60%, 10% to 55%, 10% to 50%, 10% to 45%, or 10% to 40%). In some cases, the number of nucleotides of a subject PAMmer that are 2′-O-Methyl modified is in a range of from 3% to 100% (e.g., 3% to 100%, 3% to 95%, 3% to 90%, 3% to 85%, 3% to 80%, 3% to 75%, 3% to 70%, 3% to 65%, 3% to 60%, 3% to 55%, 3% to 50%, 3% to 45%, 3% to 40%, 5% to 100%, 5% to 95%, 5% to 90%, 5% to 85%, 5% to 80%, 5% to 75%, 5% to 70%, 5% to 65%, 5% to 60%, 5% to 55%, 5% to 50%, 5% to 45%, 5% to 40%, 10% to 100%, 10% to 95%, 10% to 90%, 10% to 85%, 10% to 80%, 10% to 75%, 10% to 70%, 10% to 65%, 10% to 60%, 10% to 55%, 10% to 50%, 10% to 45%, or 10% to 40%). In some cases, the number of nucleotides of a subject guide nucleic acid that are 2′-O-Methyl modified is in a range of from 3% to 100% (e.g., 3% to 100%, 3% to 95%, 3% to 90%, 3% to 85%, 3% to 80%, 3% to 75%, 3% to 70%, 3% to 65%, 3% to 60%, 3% to 55%, 3% to 50%, 3% to 45%, 3% to 40%, 5% to 100%, 5% to 95%, 5% to 90%, 5% to 85%, 5% to 80%, 5% to 75%, 5% to 70%, 5% to 65%, 5% to 60%, 5% to 55%, 5% to 50%, 5% to 45%, 5% to 40%, 10% to 100%, 10% to 95%, 10% to 90%, 10% to 85%, 10% to 80%, 10% to 75%, 10% to 70%, 10% to 65%, 10% to 60%, 10% to 55%, 10% to 50%, 10% to 45%, or 10% to 40%).

[0379] In some cases, one or more of the nucleotides of a subject nucleic acid (e.g., a guide nucleic acid, a PAMmer, etc.) are 2′-O-Methyl modified (e.g., 2 or more, 3 or more, 4 or more, 5 or more, 6 or more, 7 or more, 8 or more, 9 or more, 10 or more, 11 or more, 12 or more, 13 or more, 14 or more, 15 or more, 16 or more, 17 or more, 18 or more, 19 or more, 20 or more, 21 or more, 22 or more, or all of the nucleotides of a subject nucleic acid are 2′-O-Methyl modified). In some cases, one or more of the nucleotides of a subject PAMmer are 2′-O-Methyl modified (e.g., 2 or more, 3 or more, 4 or more, 5 or more, 6 or more, 7 or more, 8 or more, 9 ore more, 10 or more, 11 or more, 12 or more, 13 or more, 14 or more, 15 or more, 16 or more, 17 or more, 18 or more, 19 or more, 20 or more, 21 or more, 22 or more, or all of the nucleotides of a subject PAMmer are 2′-O-Methyl modified). In some cases, one or more of the nucleotides of a subject guide nucleic acid are 2′-O-Methyl modified (e.g., 2 or more, 3 or more, 4 or more, 5 or more, 6 or more, 7 or more, 8 or more, 9 or more, 10 or more, 11 or more, 12 or more, 13 or more, 14 or more, 15 or more, 16 or more, 17 or more, 18 or more, 19 or more, 20 or more, 21 or more, 22 or more, or all of the nucleotides of a subject guide nucleic acid are 2′-O-Methyl modified).

[0380] In some cases, 99% or less of the nucleotides of a subject nucleic acid (e.g., a guide nucleic acid, a PAMmer, etc.) are 2′-O-Methyl modified (e.g., 99% or less, 95% or less, 90% or less, 85% or less, 80% or less, 75% or less, 70% or less, 65% or less, 60% or less, 55% or less, 50% or less, or 45% or less of the nucleotides of a subject nucleic acid are 2′-O-Methyl modified). In some cases, 99% or less of the nucleotides of a subject PAMmer are 2′-O-Methyl modified (e.g., e.g., 99% or less, 95% or less, 90% or less, 85% or less, 80% or less, 75% or less, 70% or less, 65% or less, 60% or less, 55% or less, 50% or less, or 45% or less of the nucleotides of a subject PAMmer are 2′-O-Methyl modified). In some cases, 99% or less of the nucleotides of a subject guide nucleic acid are 2′-O-Methyl modified (e.g., 99% or less, 95% or less, 90% or less, 85% or less, 80% or less, 75% or less, 70% or less, 65% or less, 60% or less, 55% or less, 50% or less, or 45% or less of the nucleotides of a subject guide nucleic acid are 2′-O-Methyl modified).

[0381] In some cases, the number of nucleotides of a subject nucleic acid nucleic acid (e.g., a guide nucleic acid, a PAMmer, etc.) that are 2′-O-Methyl modified is in a range of from 1 to 30 (e.g., 1 to 25, 1 to 20, 1 to 18, 1 to 15, 1 to 10, 2 to 25, 2 to 20, 2 to 18, 2 to 15, 2 to 10, 3 to 25, 3 to 20, 3 to 18, 3 to 15, or 3 to 10). In some cases, the number of nucleotides of a subject PAMmer that are 2′-O-Methyl modified is in a range of from 1 to 30 (e.g., 1 to 25, 1 to 20, 1 to 18, 1 to 15, 1 to 10, 2 to 25, 2 to 20, 2 to 18, 2 to 15, 2 to 10, 3 to 25, 3 to 20, 3 to 18, 3 to 15, or 3 to 10). In some cases, the number of nucleotides of a subject guide nucleic acid that are 2′-O-Methyl modified is in a range of from 1 to 30 (e.g., 1 to 25, 1 to 20, 1 to 18, 1 to 15, 1 to 10, 2 to 25, 2 to 20, 2 to 18, 2 to 15, 2 to 10, 3 to 25, 3 to 20, 3 to 18, 3 to 15, or 3 to 10).

[0382] In some cases, 20 or fewer of the nucleotides of a subject nucleic acid (e.g., a guide nucleic acid, a PAMmer, etc.) are 2′-O-Methyl modified (e.g., 19 or fewer, 18 or fewer, 17 or fewer, 16 or fewer, 15 or fewer, 14 or fewer, 13 or fewer, 12 or fewer, 11 or fewer, 10 or fewer, 9 or fewer, 8 or fewer, 7 or fewer, 6 or fewer, 5 or fewer, 4 or fewer, 3 or fewer, 2 or fewer, or one, of the nucleotides of a subject nucleic acid are 2′-O-Methyl modified). In some cases, 20 or fewer of the nucleotides of a subject PAMmer are 2′-O-Methyl modified (e.g., 19 or fewer, 18 or fewer, 17 or fewer, 16 or fewer, 15 or fewer, 14 or fewer, 13 or fewer, 12 or fewer, 11 or fewer, 10 or fewer, 9 or fewer, 8 or fewer, 7 or fewer, 6 or fewer, 5 or fewer, 4 or fewer, 3 or fewer, 2 or fewer, or one, of the nucleotides of a subject PAMmer are 2′-O-Methyl modified). In some cases, 20 or fewer of the nucleotides of a subject guide nucleic acid are 2′-O-Methyl modified (e.g., 19 or fewer, 18 or fewer, 17 or fewer, 16 or fewer, 15 or fewer, 14 or fewer, 13 or fewer, 12 or fewer, 11 or fewer, 10 or fewer, 9 or fewer, 8 or fewer, 7 or fewer, 6 or fewer, 5 or fewer, 4 or fewer, 3 or fewer, 2 or fewer, or one, of the nucleotides of a subject guide nucleic acid are 2′-O-Methyl modified).

[0383] 2′ Fluoro modified nucleotides (e.g., 2′ Fluoro bases) have a fluorine modified ribose which increases binding affinity (Tm) and also confers some relative nuclease resistance when compared to native RNA. These modifications are commonly employed in ribozymes and siRNAs to improve stability in serum or other biological fluids.

[0384] In some cases, 2% or more of the nucleotides of a subject nucleic acid (e.g., a guide nucleic acid, a PAMmer, etc.) are 2′ Fluoro modified (e.g., 3% or more, 5% or more, 7.5% or more, 10% or more, 15% or more, 20% or more, 25% or more, 30% or more, 35% or more, 40% or more, 45% or more, 50% or more, 55% or more, 60% or more, 65% or more, 75% or more, 80% or more, 85% or more, 90% or more, 95% or more, or 100% of the nucleotides of a subject nucleic acid are 2′ Fluoro modified). In some cases, 2% or more of the nucleotides of a subject PAMmer are 2′ Fluoro modified (e.g., 3% or more, 5% or more, 7.5% or more, 10% or more, 15% or more, 20% or more, 25% or more, 30% or more, 35% or more, 40% or more, 45% or more, 50% or more, 55% or more, 60% or more, 65% or more, 75% or more, 80% or more, 85% or more, 90% or more, 95% or more, or 100% of the nucleotides of a subject PAMmer are 2′ Fluoro modified). In some cases, 2% or more of the nucleotides of a subject guide nucleic acid are 2′ Fluoro modified (e.g., 3% or more, 5% or more, 7.5% or more, 10% or more, 15% or more, 20% or more, 25% or more, 30% or more, 35% or more, 40% or more, 45% or more, 50% or more, 55% or more, 60% or more, 65% or more, 75% or more, 80% or more, 85% or more, 90% or more, 95% or more, or 100% of the nucleotides of a subject guide nucleic acid are 2′ Fluoro modified).

[0385] In some cases, the number of nucleotides of a subject nucleic acid nucleic acid (e.g., a guide nucleic acid, a PAMmer, etc.) that are 2′ Fluoro modified is in a range of from 3% to 100% (e.g., 3% to 100%, 3% to 95%, 3% to 90%, 3% to 85%, 3% to 80%, 3% to 75%, 3% to 70%, 3% to 65%, 3% to 60%, 3% to 55%, 3% to 50%, 3% to 45%, 3% to 40%, 5% to 100%, 5% to 95%, 5% to 90%, 5% to 85%, 5% to 80%, 5% to 75%, 5% to 70%, 5% to 65%, 5% to 60%, 5% to 55%, 5% to 50%, 5% to 45%, 5% to 40%, 10% to 100%, 10% to 95%, 10% to 90%, 10% to 85%, 10% to 80%, 10% to 75%, 10% to 70%, 10% to 65%, 10% to 60%, 10% to 55%, 10% to 50%, 10% to 45%, or 10% to 40%). In some cases, the number of nucleotides of a subject PAMmer that are 2′ Fluoro modified is in a range of from 3% to 100% (e.g., 3% to 100%, 3% to 95%, 3% to 90%, 3% to 85%, 3% to 80%, 3% to 75%, 3% to 70%, 3% to 65%, 3% to 60%, 3% to 55%, 3% to 50%, 3% to 45%, 3% to 40%, 5% to 100%, 5% to 95%, 5% to 90%, 5% to 85%, 5% to 80%, 5% to 75%, 5% to 70%, 5% to 65%, 5% to 60%, 5% to 55%, 5% to 50%, 5% to 45%, 5% to 40%, 10% to 100%, 10% to 95%, 10% to 90%, 10% to 85%, 10% to 80%, 10% to 75%, 10% to 70%, 10% to 65%, 10% to 60%, 10% to 55%, 10% to 50%, 10% to 45%, or 10% to 40%). In some cases, the number of nucleotides of a subject guide nucleic acid that are 2′ Fluoro modified is in a range of from 3% to 100% (e.g., 3% to 100%, 3% to 95%, 3% to 90%, 3% to 85%, 3% to 80%, 3% to 75%, 3% to 70%, 3% to 65%, 3% to 60%, 3% to 55%, 3% to 50%, 3% to 45%, 3% to 40%, 5% to 100%, 5% to 95%, 5% to 90%, 5% to 85%, 5% to 80%, 5% to 75%, 5% to 70%, 5% to 65%, 5% to 60%, 5% to 55%, 5% to 50%, 5% to 45%, 5% to 40%, 10% to 100%, 10% to 95%, 10% to 90%, 10% to 85%, 10% to 80%, 10% to 75%, 10% to 70%, 10% to 65%, 10% to 60%, 10% to 55%, 10% to 50%, 10% to 45%, or 10% to 40%).

[0386] In some cases, one or more of the nucleotides of a subject nucleic acid (e.g., a guide nucleic acid, a PAMmer, etc.) are 2′ Fluoro modified (e.g., 2 or more, 3 or more, 4 or more, 5 or more, 6 or more, 7 or more, 8 or more, 9 or more, 10 or more, 11 or more, 12 or more, 13 or more, 14 or more, 15 or more, 16 or more, 17 or more, 18 or more, 19 or more, 20 or more, 21 or more, 22 or more, or all of the nucleotides of a subject nucleic acid are 2′ Fluoro modified). In some cases, one or more of the nucleotides of a subject PAMmer are 2′ Fluoro modified (e.g., 2 or more, 3 or more, 4 or more, 5 or more, 6 or more, 7 or more, 8 or more, 9 or more, 10 or more, 11 or more, 12 or more, 13 or more, 14 or more, 15 or more, 16 or more, 17 or more, 18 or more, 19 or more, 20 or more, 21 or more, 22 or more, or all of the nucleotides of a subject PAMmer are 2′ Fluoro modified). In some cases, one or more of the nucleotides of a subject guide nucleic acid are 2′ Fluoro modified (e.g., 2 or more, 3 or more, 4 or more, 5 or more, 6 or more, 7 or more, 8 or more, 9 or more, 10 or more, 11 or more, 12 or more, 13 or more, 14 or more, 15 or more, 16 or more, 17 or more, 18 or more, 19 or more, 20 or more, 21 or more, 22 or more, or all of the nucleotides of a subject guide nucleic acid are 2′ Fluoro modified).

[0387] In some cases, 99% or less of the nucleotides of a subject nucleic acid (e.g., a guide nucleic acid, a PAMmer, etc.) are 2′ Fluoro modified (e.g., 99% or less, 95% or less, 90% or less, 85% or less, 80% or less, 75% or less, 70% or less, 65% or less, 60% or less, 55% or less, 50% or less, or 45% or less of the nucleotides of a subject nucleic acid are 2′ Fluoro modified). In some cases, 99% or less of the nucleotides of a subject PAMmer are 2′ Fluoro modified (e.g., e.g., 99% or less, 95% or less, 90% or less, 85% or less, 80% or less, 75% or less, 70% or less, 65% or less, 60% or less, 55% or less, 50% or less, or 45% or less of the nucleotides of a subject PAMmer are 2′ Fluoro modified). In some cases, 99% or less of the nucleotides of a subject guide nucleic acid are 2′ Fluoro modified (e.g., 99% or less, 95% or less, 90% or less, 85% or less, 80% or less, 75% or less, 70% or less, 65% or less, 60% or less, 55% or less, 50% or less, or 45% or less of the nucleotides of a subject guide nucleic acid are 2′ Fluoro modified).

[0388] In some cases, the number of nucleotides of a subject nucleic acid nucleic acid (e.g., a guide nucleic acid, a PAMmer, etc.) that are 2′ Fluoro modified is in a range of from 1 to 30 (e.g., 1 to 25, 1 to 20, 1 to 18, 1 to 15, 1 to 10, 2 to 25, 2 to 20, 2 to 18, 2 to 15, 2 to 10, 3 to 25, 3 to 20, 3 to 18, 3 to 15, or 3 to 10). In some cases, the number of nucleotides of a subject PAMmer that are 2′ Fluoro modified is in a range of from 1 to 30 (e.g., 1 to 25, 1 to 20, 1 to 18, 1 to 15, 1 to 10, 2 to 25, 2 to 20, 2 to 18, 2 to 15, 2 to 10, 3 to 25, 3 to 20, 3 to 18, 3 to 15, or 3 to 10). In some cases, the number of nucleotides of a subject guide nucleic acid that are 2′ Fluoro modified is in a range of from 1 to 30 (e.g., 1 to 25, 1 to 20, 1 to 18, 1 to 15, 1 to 10, 2 to 25, 2 to 20, 2 to 18, 2 to 15, 2 to 10, 3 to 25, 3 to 20, 3 to 18, 3 to 15, or 3 to 10).

[0389] In some cases, 20 or fewer of the nucleotides of a subject nucleic acid (e.g., a guide nucleic acid, a PAMmer, etc.) are 2′ Fluoro modified (e.g., 19 or fewer, 18 or fewer, 17 or fewer, 16 or fewer, 15 or fewer, 14 or fewer, 13 or fewer, 12 or fewer, 11 or fewer, 10 or fewer, 9 or fewer, 8 or fewer, 7 or fewer, 6 or fewer, 5 or fewer, 4 or fewer, 3 or fewer, 2 or fewer, or one, of the nucleotides of a subject nucleic acid are 2′ Fluoro modified). In some cases, 20 or fewer of the nucleotides of a subject PAMmer are 2′ Fluoro modified (e.g., 19 or fewer, 18 or fewer, 17 or fewer, 16 or fewer, 15 or fewer, 14 or fewer, 13 or fewer, 12 or fewer, 11 or fewer, 10 or fewer, 9 or fewer, 8 or fewer, 7 or fewer, 6 or fewer, 5 or fewer, 4 or fewer, 3 or fewer, 2 or fewer, or one, of the nucleotides of a subject PAMmer are 2′ Fluoro modified). In some cases, 20 or fewer of the nucleotides of a subject guide nucleic acid are 2′ Fluoro modified (e.g., 19 or fewer, 18 or fewer, 17 or fewer, 16 or fewer, 15 or fewer, 14 or fewer, 13 or fewer, 12 or fewer, 11 or fewer, 10 or fewer, 9 or fewer, 8 or fewer, 7 or fewer, 6 or fewer, 5 or fewer, 4 or fewer, 3 or fewer, 2 or fewer, or one, of the nucleotides of a subject guide nucleic acid are 2′ Fluoro modified).

[0390] LNA bases have a modification to the ribose backbone that locks the base in the C3′-endo position, which favors RNA A-type helix duplex geometry. This modification significantly increases Tm and is also very nuclease resistant. Multiple LNA insertions can be placed in an oligo at any position except the 3′-end. Applications have been described ranging from antisense oligos to hybridization probes to SNP detection and allele specific PCR. Due to the large increase in Tm conferred by LNAs, they also can cause an increase in primer dimer formation as well as self-hairpin formation. In some cases, the number of LNAs incorporated into a single oligo is 10 bases or less.

[0391] In some cases, the number of nucleotides of a subject nucleic acid nucleic acid (e.g., a guide nucleic acid, a PAMmer, etc.) that have an LNA base is in a range of from 3% to 99% (e.g., 3% to 99%, 3% to 95%, 3% to 90%, 3% to 85%, 3% to 80%, 3% to 75%, 3% to 70%, 3% to 65%, 3% to 60%, 3% to 55%, 3% to 50%, 3% to 45%, 3% to 40%, 5% to 99%, 5% to 95%, 5% to 90%, 5% to 85%, 5% to 80%, 5% to 75%, 5% to 70%, 5% to 65%, 5% to 60%, 5% to 55%, 5% to 50%, 5% to 45%, 5% to 40%, 10% to 99%, 10% to 95%, 10% to 90%, 10% to 85%, 10% to 80%, 10% to 75%, 10% to 70%, 10% to 65%, 10% to 60%, 10% to 55%, 10% to 50%, 10% to 45%, or 10% to 40%). In some cases, the number of nucleotides of a subject PAMmer that have an LNA base is in a range of from 3% to 99% (e.g., 3% to 99%, 3% to 95%, 3% to 90%, 3% to 85%, 3% to 80%, 3% to 75%, 3% to 70%, 3% to 65%, 3% to 60%, 3% to 55%, 3% to 50%, 3% to 45%, 3% to 40%, 5% to 99%, 5% to 95%, 5% to 90%, 5% to 85%, 5% to 80%, 5% to 75%, 5% to 70%, 5% to 65%, 5% to 60%, 5% to 55%, 5% to 50%, 5% to 45%, 5% to 40%, 10% to 99%, 10% to 95%, 10% to 90%, 10% to 85%, 10% to 80%, 10% to 75%, 10% to 70%, 10% to 65%, 10% to 60%, 10% to 55%, 10% to 50%, 10% to 45%, or 10% to 40%). In some cases, the number of nucleotides of a subject guide nucleic acid that have an LNA base is in a range of from 3% to 99% (e.g., 3% to 99%, 3% to 95%, 3% to 90%, 3% to 85%, 3% to 80%, 3% to 75%, 3% to 70%, 3% to 65%, 3% to 60%, 3% to 55%, 3% to 50%, 3% to 45%, 3% to 40%, 5% to 99%, 5% to 95%, 5% to 90%, 5% to 85%, 5% to 80%, 5% to 75%, 5% to 70%, 5% to 65%, 5% to 60%, 5% to 55%, 5% to 50%, 5% to 45%, 5% to 40%, 10% to 99%, 10% to 95%, 10% to 90%, 10% to 85%, 10% to 80%, 10% to 75%, 10% to 70%, 10% to 65%, 10% to 60%, 10% to 55%, 10% to 50%, 10% to 45%, or 10% to 40%).

[0392] In some cases, one or more of the nucleotides of a subject nucleic acid (e.g., a guide nucleic acid, a PAMmer, etc.) have an LNA base (e.g., 2 or more, 3 or more, 4 or more, 5 or more, 6 or more, 7 or more, 8 or more, 9 or more, 10 or more, 11 or more, 12 or more, 13 or more, 14 or more, 15 or more, 16 or more, 17 or more, 18 or more, 19 or more, 20 or more, 21 or more, 22 or more, or all of the nucleotides of a subject nucleic acid have an LNA base). In some cases, one or more of the nucleotides of a subject PAMmer have an LNA base (e.g., 2 or more, 3 or more, 4 or more, 5 or more, 6 or more, 7 or more, 8 or more, 9 or more, 10 or more, 11 or more, 12 or more, 13 or more, 14 or more, 15 or more, 16 or more, 17 or more, 18 or more, 19 or more, 20 or more, 21 or more, 22 or more, or all of the nucleotides of a subject PAMmer have an LNA base). In some cases, one or more of the nucleotides of a subject guide nucleic acid have an LNA base (e.g., 2 or more, 3 or more, 4 or more, 5 or more, 6 or more, 7 or more, 8 or more, 9 or more, 10 or more, 11 or more, 12 or more, 13 or more, 14 or more, 15 or more, 16 or more, 17 or more, 18 or more, 19 or more, 20 or more, 21 or more, 22 or more, or all of the nucleotides of a subject guide nucleic acid have an LNA base).

[0393] In some cases, 99% or less of the nucleotides of a subject nucleic acid (e.g., a guide nucleic acid, a PAMmer, etc.) have an LNA base (e.g., 99% or less, 95% or less, 90% or less, 85% or less, 80% or less, 75% or less, 70% or less, 65% or less, 60% or less, 55% or less, 50% or less, or 45% or less of the nucleotides of a subject nucleic acid have an LNA base). In some cases, 99% or less of the nucleotides of a subject PAMmer have an LNA base (e.g., e.g., 99% or less, 95% or less, 90% or less, 85% or less, 80% or less, 75% or less, 70% or less, 65% or less, 60% or less, 55% or less, 50% or less, or 45% or less of the nucleotides of a subject PAMmer have an LNA base). In some cases, 99% or less of the nucleotides of a subject guide nucleic acid have an LNA base (e.g., 99% or less, 95% or less, 90% or less, 85% or less, 80% or less, 75% or less, 70% or less, 65% or less, 60% or less, 55% or less, 50% or less, or 45% or less of the nucleotides of a subject guide nucleic acid have an LNA base).

[0394] In some cases, the number of nucleotides of a subject nucleic acid nucleic acid (e.g., a guide nucleic acid, a PAMmer, etc.) that have an LNA base is in a range of from 1 to 30 (e.g., 1 to 25, 1 to 20, 1 to 18, 1 to 15, 1 to 10, 2 to 25, 2 to 20, 2 to 18, 2 to 15, 2 to 10, 3 to 25, 3 to 20, 3 to 18, 3 to 15, or 3 to 10). In some cases, the number of nucleotides of a subject PAMmer that have an LNA base is in a range of from 1 to 30 (e.g., 1 to 25, 1 to 20, 1 to 18, 1 to 15, 1 to 10, 2 to 25, 2 to 20, 2 to 18, 2 to 15, 2 to 10, 3 to 25, 3 to 20, 3 to 18, 3 to 15, or 3 to 10). In some cases, the number of nucleotides of a subject guide nucleic acid that have an LNA base is in a range of from 1 to 30 (e.g., 1 to 25, 1 to 20, 1 to 18, 1 to 15, 1 to 10, 2 to 25, 2 to 20, 2 to 18, 2 to 15, 2 to 10, 3 to 25, 3 to 20, 3 to 18, 3 to 15, or 3 to 10).

[0395] In some cases, 20 or fewer of the nucleotides of a subject nucleic acid (e.g., a guide nucleic acid, a PAMmer, etc.) have an LNA base (e.g., 19 or fewer, 18 or fewer, 17 or fewer, 16 or fewer, 15 or fewer, 14 or fewer, 13 or fewer, 12 or fewer, 11 or fewer, 10 or fewer, 9 or fewer, 8 or fewer, 7 or fewer, 6 or fewer, 5 or fewer, 4 or fewer, 3 or fewer, 2 or fewer, or one, of the nucleotides of a subject nucleic acid have an LNA base). In some cases, 20 or fewer of the nucleotides of a subject PAMmer have an LNA base (e.g., 19 or fewer, 18 or fewer, 17 or fewer, 16 or fewer, 15 or fewer, 14 or fewer, 13 or fewer, 12 or fewer, 11 or fewer, 10 or fewer, 9 or fewer, 8 or fewer, 7 or fewer, 6 or fewer, 5 or fewer, 4 or fewer, 3 or fewer, 2 or fewer, or one, of the nucleotides of a subject PAMmer have an LNA base). In some cases, 20 or fewer of the nucleotides of a subject guide nucleic acid have an LNA base (e.g., 19 or fewer, 18 or fewer, 17 or fewer, 16 or fewer, 15 or fewer, 14 or fewer, 13 or fewer, 12 or fewer, 11 or fewer, 10 or fewer, 9 or fewer, 8 or fewer, 7 or fewer, 6 or fewer, 5 or fewer, 4 or fewer, 3 or fewer, 2 or fewer, or one, of the nucleotides of a subject guide nucleic acid have an LNA base).

[0396] The phosphorothioate (PS) bond (i.e., a phosphorothioate linkage) substitutes a sulfur atom for a non-bridging oxygen in the phosphate backbone of a nucleic acid (e.g., an oligo). This modification renders the internucleotide linkage resistant to nuclease degradation.

[0397] Phosphorothioate bonds can be introduced between the last 3-5 nucleotides at the 5′- or 3′-end of the oligo to inhibit exonuclease degradation. Including phosphorothioate bonds within the oligo (e.g., throughout the entire oligo) can help reduce attack by endonucleases as well.

[0398] In some cases, the number of nucleotides of a subject nucleic acid nucleic acid (e.g., a guide nucleic acid, a PAMmer, etc.) that have a phosphorothioate linkage is in a range of from 3% to 99% (e.g., 3% to 99%, 3% to 95%, 3% to 90%, 3% to 85%, 3% to 80%, 3% to 75%, 3% to 70%, 3% to 65%, 3% to 60%, 3% to 55%, 3% to 50%, 3% to 45%, 3% to 40%, 5% to 99%, 5% to 95%, 5% to 90%, 5% to 85%, 5% to 80%, 5% to 75%, 5% to 70%, 5% to 65%, 5% to 60%, 5% to 55%, 5% to 50%, 5% to 45%, 5% to 40%, 10% to 99%, 10% to 95%, 10% to 90%, 10% to 85%, 10% to 80%, 10% to 75%, 10% to 70%, 10% to 65%, 10% to 60%, 10% to 55%, 10% to 50%, 10% to 45%, or 10% to 40%). In some cases, the number of nucleotides of a subject PAMmer that have a phosphorothioate linkage is in a range of from 3% to 99% (e.g., 3% to 99%, 3% to 95%, 3% to 90%, 3% to 85%, 3% to 80%, 3% to 75%, 3% to 70%, 3% to 65%, 3% to 60%, 3% to 55%, 3% to 50%, 3% to 45%, 3% to 40%, 5% to 99%, 5% to 95%, 5% to 90%, 5% to 85%, 5% to 80%, 5% to 75%, 5% to 70%, 5% to 65%, 5% to 60%, 5% to 55%, 5% to 50%, 5% to 45%, 5% to 40%, 10% to 99%, 10% to 95%, 10% to 90%, 10% to 85%, 10% to 80%, 10% to 75%, 10% to 70%, 10% to 65%, 10% to 60%, 10% to 55%, 10% to 50%, 10% to 45%, or 10% to 40%). In some cases, the number of nucleotides of a subject guide nucleic acid that have a phosphorothioate linkage is in a range of from 3% to 99% (e.g., 3% to 99%, 3% to 95%, 3% to 90%, 3% to 85%, 3% to 80%, 3% to 75%, 3% to 70%, 3% to 65%, 3% to 60%, 3% to 55%, 3% to 50%, 3% to 45%, 3% to 40%, 5% to 99%, 5% to 95%, 5% to 90%, 5% to 85%, 5% to 80%, 5% to 75%, 5% to 70%, 5% to 65%, 5% to 60%, 5% to 55%, 5% to 50%, 5% to 45%, 5% to 40%, 10% to 99%, 10% to 95%, 10% to 90%, 10% to 85%, 10% to 80%, 10% to 75%, 10% to 70%, 10% to 65%, 10% to 60%, 10% to 55%, 10% to 50%, 10% to 45%, or 10% to 40%).

[0399] In some cases, one or more of the nucleotides of a subject nucleic acid (e.g., a guide nucleic acid, a PAMmer, etc.) have a phosphorothioate linkage (e.g., 2 or more, 3 or more, 4 or more, 5 or more, 6 or more, 7 or more, 8 or more, 9 or more, 10 or more, 11 or more, 12 or more, 13 or more, 14 or more, 15 or more, 16 or more, 17 or more, 18 or more, 19 or more, 20 or more, 21 or more, 22 or more, or all of the nucleotides of a subject nucleic acid have a phosphorothioate linkage). In some cases, one or more of the nucleotides of a subject PAMmer have a phosphorothioate linkage (e.g., 2 or more, 3 or more, 4 or more, 5 or more, 6 or more, 7 or more, 8 or more, 9 or more, 10 or more, 11 or more, 12 or more, 13 or more, 14 or more, 15 or more, 16 or more, 17 or more, 18 or more, 19 or more, 20 or more, 21 or more, 22 or more, or all of the nucleotides of a subject PAMmer have a phosphorothioate linkage). In some cases, one or more of the nucleotides of a subject guide nucleic acid have a phosphorothioate linkage (e.g., 2 or more, 3 or more, 4 or more, 5 or more, 6 or more, 7 or more, 8 or more, 9 or more, 10 or more, 11 or more, 12 or more, 13 or more, 14 or more, 15 or more, 16 or more, 17 or more, 18 or more, 19 or more, 20 or more, 21 or more, 22 or more, or all of the nucleotides of a subject guide nucleic acid have a phosphorothioate linkage).

[0400] In some cases, 99% or less of the nucleotides of a subject nucleic acid (e.g., a guide nucleic acid, a PAMmer, etc.) have a phosphorothioate linkage (e.g., 99% or less, 95% or less, 90% or less, 85% or less, 80% or less, 75% or less, 70% or less, 65% or less, 60% or less, 55% or less, 50% or less, or 45% or less of the nucleotides of a subject nucleic acid have a phosphorothioate linkage). In some cases, 99% or less of the nucleotides of a subject PAMmer have a phosphorothioate linkage (e.g., e.g., 99% or less, 95% or less, 90% or less, 85% or less, 80% or less, 75% or less, 70% or less, 65% or less, 60% or less, 55% or less, 50% or less, or 45% or less of the nucleotides of a subject PAMmer have a phosphorothioate linkage). In some cases, 99% or less of the nucleotides of a subject guide nucleic acid have a phosphorothioate linkage (e.g., 99% or less, 95% or less, 90% or less, 85% or less, 80% or less, 75% or less, 70% or less, 65% or less, 60% or less, 55% or less, 50% or less, or 45% or less of the nucleotides of a subject guide nucleic acid have a phosphorothioate linkage).

[0401] In some cases, the number of nucleotides of a subject nucleic acid nucleic acid (e.g., a guide nucleic acid, a PAMmer, etc.) that have a phosphorothioate linkage is in a range of from 1 to 30 (e.g., 1 to 25, 1 to 20, 1 to 18, 1 to 15, 1 to 10, 2 to 25, 2 to 20, 2 to 18, 2 to 15, 2 to 10, 3 to 25, 3 to 20, 3 to 18, 3 to 15, or 3 to 10). In some cases, the number of nucleotides of a subject PAMmer that have a phosphorothioate linkage is in a range of from 1 to 30 (e.g., 1 to 25, 1 to 20, 1 to 18, 1 to 15, 1 to 10, 2 to 25, 2 to 20, 2 to 18, 2 to 15, 2 to 10, 3 to 25, 3 to 20, 3 to 18, 3 to 15, or 3 to 10). In some cases, the number of nucleotides of a subject guide nucleic acid that have a phosphorothioate linkage is in a range of from 1 to 30 (e.g., 1 to 25, 1 to 20, 1 to 18, 1 to 15, 1 to 10, 2 to 25, 2 to 20, 2 to 18, 2 to 15, 2 to 10, 3 to 25, 3 to 20, 3 to 18, 3 to 15, or 3 to 10).

[0402] In some cases, 20 or fewer of the nucleotides of a subject nucleic acid (e.g., a guide nucleic acid, a PAMmer, etc.) have a phosphorothioate linkage (e.g., 19 or fewer, 18 or fewer, 17 or fewer, 16 or fewer, 15 or fewer, 14 or fewer, 13 or fewer, 12 or fewer, 11 or fewer, 10 or fewer, 9 or fewer, 8 or fewer, 7 or fewer, 6 or fewer, 5 or fewer, 4 or fewer, 3 or fewer, 2 or fewer, or one, of the nucleotides of a subject nucleic acid have a phosphorothioate linkage). In some cases, 20 or fewer of the nucleotides of a subject PAMmer have a phosphorothioate linkage (e.g., 19 or fewer, 18 or fewer, 17 or fewer, 16 or fewer, 15 or fewer, 14 or fewer, 13 or fewer, 12 or fewer, 11 or fewer, 10 or fewer, 9 or fewer, 8 or fewer, 7 or fewer, 6 or fewer, 5 or fewer, 4 or fewer, 3 or fewer, 2 or fewer, or one, of the nucleotides of a subject PAMmer have a phosphorothioate linkage). In some cases, 20 or fewer of the nucleotides of a subject guide nucleic acid have a phosphorothioate linkage (e.g., 19 or fewer, 18 or fewer, 17 or fewer, 16 or fewer, 15 or fewer, 14 or fewer, 13 or fewer, 12 or fewer, 11 or fewer, 10 or fewer, 9 or fewer, 8 or fewer, 7 or fewer, 6 or fewer, 5 or fewer, 4 or fewer, 3 or fewer, 2 or fewer, or one, of the nucleotides of a subject guide nucleic acid have a phosphorothioate linkage).

[0403] In some embodiments, a subject nucleic acid (e.g., a guide nucleic acid, a PAMmer, etc.) has one or more nucleotides that are 2′-O-Methyl modified nucleotides. In some embodiments, a subject nucleic acid (e.g., a guide nucleic acid, a PAMmer, etc.) has one or more 2′ Fluoro modified nucleotides. In some embodiments, a subject nucleic acid (e.g., a guide nucleic acid, a PAMmer, etc.) has one or more LNA bases. In some embodiments, a subject nucleic acid (e.g., a guide nucleic acid, a PAMmer, etc.) has one or more nucleotides that are linked by a phosphorothioate bond (i.e., the subject nucleic acid has one or more phosphorothioate linkages). In some embodiments, a subject nucleic acid (e.g., a guide nucleic acid, a PAMmer, etc.) has a 5′ cap (e.g., a 7-methylguanylate cap (m7G)).

[0404] In some embodiments, a subject nucleic acid (e.g., a guide nucleic acid, a PAMmer, etc.) has a combination of modified nucleotides. For example, a subject nucleic acid (e.g., a guide nucleic acid, a PAMmer, etc.) can have a 5′ cap (e.g., a 7-methylguanylate cap (m7G)) in addition to having one or more nucleotides with other modifications (e.g., a 2′-O-Methyl nucleotide and/or a 2′ Fluoro modified nucleotide and/or a LNA base and/or a phosphorothioate linkage). See, e.g., FIG. 17 and FIG. 21 for working examples that utilize subject nucleic acids having one or more modified nucleotides. A subject nucleic acid can have any combination of modifications. For example, a subject nucleic acid can have any combination of the above described modifications.

[0405] In some embodiments, a subject guide nucleic acid has one or more nucleotides that are 2′-O-Methyl modified nucleotides. In some embodiments, a subject guide nucleic acid has one or more 2′ Fluoro modified nucleotides. In some embodiments, a subject guide nucleic acid has one or more LNA bases. In some embodiments, a subject guide nucleic acid has one or more nucleotides that are linked by a phosphorothioate bond (i.e., the subject nucleic acid has one or more phosphorothioate linkages). In some embodiments, a subject guide nucleic acid has a 5′ cap (e.g., a 7-methylguanylate cap (m7G)).

[0406] In some embodiments, a subject guide nucleic acid has a combination of modified nucleotides. For example, a subject guide nucleic acid can have a 5′ cap (e.g., a 7-methylguanylate cap (m7G)) in addition to having one or more nucleotides with other modifications (e.g., a 2′-O-Methyl nucleotide and/or a 2′ Fluoro modified nucleotide and/or a LNA base and/or a phosphorothioate linkage). A subject guide nucleic acid can have any combination of modifications. For example, a subject guide nucleic acid can have any combination of the above described modifications.

[0407] In some embodiments, a subject PAMmer has one or more nucleotides that are 2′-O-Methyl modified nucleotides. In some embodiments, a subject PAMmer has one or more 2′ Fluoro modified nucleotides. In some embodiments, a subject PAMmer has one or more LNA bases. In some embodiments, a subject PAMmer has one or more nucleotides that are linked by a phosphorothioate bond (i.e., the subject nucleic acid has one or more phosphorothioate linkages). In some embodiments, a subject PAMmer has a 5′ cap (e.g., a 7-methylguanylate cap (m7G)).

[0408] In some embodiments, a subject PAMmer has a combination of modified nucleotides. For example, a subject PAMmer can have a 5′ cap (e.g., a 7-methylguanylate cap (m7G)) in addition to having one or more nucleotides with other modifications (e.g., a 2′-O-Methyl nucleotide and/or a 2′ Fluoro modified nucleotide and/or a LNA base and/or a phosphorothioate linkage). See, e.g., FIG. 17 and FIG. 21 for working examples that utilize PAMmers having one or more modified nucleotides. A subject PAMmer can have any combination of modifications. For example, a subject PAMmer can have any combination of the above described modifications.

[0409] Modified Backbones and Modified Internucleoside Linkages

[0410] Examples of suitable nucleic acids containing modifications include nucleic acids containing modified backbones or non-natural internucleoside linkages. Nucleic acids having modified backbones include those that retain a phosphorus atom in the backbone and those that do not have a phosphorus atom in the backbone.

[0411] Suitable modified oligonucleotide backbones containing a phosphorus atom therein include, for example, phosphorothioates, chiral phosphorothioates, phosphorodithioates, phosphotriesters, aminoalkylphosphotriesters, methyl and other alkyl phosphonates including 3′-alkylene phosphonates, 5′-alkylene phosphonates and chiral phosphonates, phosphinates, phosphoramidates including 3′-amino phosphoramidate and aminoalkylphosphoramidates, phosphorodiamidates, thionophosphoramidates, thionoalkylphosphonates, thionoalkylphosphotriesters, selenophosphates and boranophosphates having normal 3′-5′ linkages, 2′-5′ linked analogs of these, and those having inverted polarity wherein one or more internucleotide linkages is a 3′ to 3′, 5′ to 5′ or 2′ to 2′ linkage. Suitable oligonucleotides having inverted polarity comprise a single 3′ to 3′ linkage at the 3′-most internucleotide linkage i.e. a single inverted nucleoside residue which may be a basic (the nucleobase is missing or has a hydroxyl group in place thereof). Various salts (such as, for example, potassium or sodium), mixed salts and free acid forms are also included.

[0412] In some embodiments, a subject nucleic acid comprises one or more phosphorothioate and/or heteroatom internucleoside linkages, in particular —CH₂—NH—O—CH₂—, —CH₂—N(CH₃)—O—CH₂—(known as a methylene (methylimino) or MMI backbone), —CH₂—O—N(CH₃)—CH₂—, —CH₂—N(CH₃)—N(CH₃)—CH₂— and —O—N(CH₃)—CH₂—CH₂— (wherein the native phosphodiester internucleotide linkage is represented as —O—P(═O)(OH)—O—CH₂—). MMI type internucleoside linkages are disclosed in the above referenced U.S. Pat. No. 5,489,677. Suitable amide internucleoside linkages are disclosed in t U.S. Pat. No. 5,602,240.

[0413] Also suitable are nucleic acids having morpholino backbone structures as described in, e.g., U.S. Pat. No. 5,034,506. For example, in some embodiments, a subject nucleic acid comprises a 6-membered morpholino ring in place of a ribose ring. In some of these embodiments, a phosphorodiamidate or other non-phosphodiester internucleoside linkage replaces a phosphodiester linkage.

[0414] Suitable modified polynucleotide backbones that do not include a phosphorus atom therein have backbones that are formed by short chain alkyl or cycloalkyl internucleoside linkages, mixed heteroatom and alkyl or cycloalkyl internucleoside linkages, or one or more short chain heteroatomic or heterocyclic internucleoside linkages. These include those having morpholino linkages (formed in part from the sugar portion of a nucleoside); siloxane backbones; sulfide, sulfoxide and sulfone backbones; formacetyl and thioformacetyl backbones; methylene formacetyl and thioformacetyl backbones; riboacetyl backbones; alkene containing backbones; sulfamate backbones; methyleneimino and methylenehydrazino backbones; sulfonate and sulfonamide backbones; amide backbones; and others having mixed N, O, S and CH₂ component parts.

[0415] Mimetics

[0416] A subject nucleic acid can be a nucleic acid mimetic. The term “mimetic” as it is applied to polynucleotides is intended to include polynucleotides wherein only the furanose ring or both the furanose ring and the internucleotide linkage are replaced with non-furanose groups, replacement of only the furanose ring is also referred to in the art as being a sugar surrogate. The heterocyclic base moiety or a modified heterocyclic base moiety is maintained for hybridization with an appropriate target nucleic acid. One such nucleic acid, a polynucleotide mimetic that has been shown to have excellent hybridization properties, is referred to as a peptide nucleic acid (PNA). In PNA, the sugar-backbone of a polynucleotide is replaced with an amide containing backbone, in particular an aminoethylglycine backbone. The nucleotides are retained and are bound directly or indirectly to aza nitrogen atoms of the amide portion of the backbone.

[0417] One polynucleotide mimetic that has been reported to have excellent hybridization properties is a peptide nucleic acid (PNA). The backbone in PNA compounds is two or more linked aminoethylglycine units which gives PNA an amide containing backbone. The heterocyclic base moieties are bound directly or indirectly to aza nitrogen atoms of the amide portion of the backbone. Representative U.S. patents that describe the preparation of PNA compounds include, but are not limited to: U.S. Pat. Nos. 5,539,082; 5,714,331; and 5,719,262.

[0418] Another class of polynucleotide mimetic that has been studied is based on linked morpholino units (morpholino nucleic acid) having heterocyclic bases attached to the morpholino ring. A number of linking groups have been reported that link the morpholino monomeric units in a morpholino nucleic acid. One class of linking groups has been selected to give a non-ionic oligomeric compound. The non-ionic morpholino-based oligomeric compounds are less likely to have undesired interactions with cellular proteins. Morpholino-based polynucleotides are non-ionic mimics of oligonucleotides which are less likely to form undesired interactions with cellular proteins (Dwaine A. Braasch and David R. Corey, Biochemistry, 2002, 41(14), 4503-4510). Morpholino-based polynucleotides are disclosed in U.S. Pat. No. 5,034,506. A variety of compounds within the morpholino class of polynucleotides have been prepared, having a variety of different linking groups joining the monomeric subunits.

[0419] A further class of polynucleotide mimetic is referred to as cyclohexenyl nucleic acids (CeNA). The furanose ring normally present in a DNA/RNA molecule is replaced with a cyclohexenyl ring. CeNA DMT protected phosphoramidite monomers have been prepared and used for oligomeric compound synthesis following classical phosphoramidite chemistry. Fully modified CeNA oligomeric compounds and oligonucleotides having specific positions modified with CeNA have been prepared and studied (see Wang et al., J. Am. Chem. Soc., 2000, 122, 8595-8602). In general the incorporation of CeNA monomers into a DNA chain increases its stability of a DNA/RNA hybrid. CeNA oligoadenylates formed complexes with RNA and DNA complements with similar stability to the native complexes. The study of incorporating CeNA structures into natural nucleic acid structures was shown by NMR and circular dichroism to proceed with easy conformational adaptation.

[0420] A further modification includes Locked Nucleic Acids (LNAs) in which the 2′-hydroxyl group is linked to the 4′ carbon atom of the sugar ring thereby forming a 2′-C,4′-C-oxymethylene linkage thereby forming a bicyclic sugar moiety. The linkage can be a methylene (—CH₂—), group bridging the 2′ oxygen atom and the 4′ carbon atom wherein n is 1 or 2 (Singh et al., Chem. Commun., 1998, 4, 455-456). LNA and LNA analogs display very high duplex thermal stabilities with complementary DNA and RNA (Tm=+3 to +10° C.), stability towards 3′-exonucleolytic degradation and good solubility properties. Potent and nontoxic antisense oligonucleotides containing LNAs have been described (e.g., Wahlestedt et al., Proc. Natl. Acad. Sci. U.S.A., 2000, 97, 5633-5638).

[0421] The synthesis and preparation of the LNA monomers adenine, cytosine, guanine, 5-methyl-cytosine, thymine and uracil, along with their oligomerization, and nucleic acid recognition properties have been described (e.g., Koshkin et al., Tetrahedron, 1998, 54, 3607-3630). LNAs and preparation thereof are also described in WO 98/39352 and WO 99/14226, as well as U.S. applications 20120165514, 20100216983, 20090041809, 20060117410, 20040014959, 20020094555, and 20020086998.

[0422] Modified Sugar Moieties

[0423] A subject nucleic acid can also include one or more substituted sugar moieties. Suitable polynucleotides comprise a sugar substituent group selected from: OH; F; O-, S-, or N-alkyl; O-, S-, or N-alkenyl; O-, S- or N-alkynyl; or O-alkyl-O-alkyl, wherein the alkyl, alkenyl and alkynyl may be substituted or unsubstituted C.sub.1 to C₁₀ alkyl or C₂ to C₁₀ alkenyl and alkynyl. Particularly suitable are O((CH₂)ₙO)ₘCH₃, O(CH₂)ₙOC_{H3}, O(CH₂)ₙNH₂, O(CH₂)ₙCH₃, O(CH₂)ₙONH₂, and O(CH₂)—ON((CH₂)ₙCH₃)₂, where n and m are from 1 to about 10. Other suitable polynucleotides comprise a sugar substituent group selected from: C₁ to C₁₀ lower alkyl, substituted lower alkyl, alkenyl, alkynyl, alkaryl, aralkyl, O-alkaryl or O-aralkyl, SH, SCH₃, OCN, Cl, Br, CN, CF₃, OCF₃, SOCH₃, SO₂CH₃, ONO₂, NO₂, N₃, NH₂, heterocycloalkyl, heterocycloalkaryl, aminoalkylamino, polyalkylamino, substituted silyl, an RNA cleaving group, a reporter group, an intercalator, a group for improving the pharmacokinetic properties of an oligonucleotide, or a group for improving the pharmacodynamic properties of an oligonucleotide, and other substituents having similar properties. A suitable modification includes 2′-methoxyethoxy (2′-O—CH₂CH₂OCH₃, also known as 2′-O-(2-methoxyethyl) or 2′-MOE) (Martin et al., Helv. Chim. Acta, 1995, 78, 486-504) i.e., an alkoxyalkoxy group. A further suitable modification includes 2′-dimethylaminooxyethoxy, i.e., a O(CH₂)₂ON(CH₃)₂ group, also known as 2′-DMAOE, as described in examples hereinbelow, and 2′-dimethylaminoethoxyethoxy (also known in the art as 2′-O-dimethyl-amino-ethoxy-ethyl or 2′-DMAEOE), i.e., 2′-O—CH₂—O—CH₂—N(CH₃)₂.

[0424] Other suitable sugar substituent groups include methoxy (—O—CH₃), aminopropoxy (—OCH₂CH₂CH₂NH₂), allyl (—CH₂—CH═CH₂), —O-allyl (—O—CH₂CH═CH₂) and fluoro (F). 2′-sugar substituent groups may be in the arabino (up) position or ribo (down) position. A suitable 2′-arabino modification is 2′-F. Similar modifications may also be made at other positions on the oligomeric compound, particularly the 3′ position of the sugar on the 3′ terminal nucleoside or in 2′-5′ linked oligonucleotides and the 5′ position of 5′ terminal nucleotide. Oligomeric compounds may also have sugar mimetics such as cyclobutyl moieties in place of the pentofuranosyl sugar.

[0425] Base Modifications and Substitutions

[0426] A subject nucleic acid may also include nucleobase (often referred to in the art simply as “base”) modifications or substitutions. As used herein, “unmodified” or “natural” nucleobases include the purine bases adenine (A) and guanine (G), and the pyrimidine bases thymine (T), cytosine (C) and uracil (U). Modified nucleobases include other synthetic and natural nucleobases such as 5-methylcytosine (5-me-C), 5-hydroxymethyl cytosine, xanthine, hypoxanthine, 2-aminoadenine, 6-methyl and other alkyl derivatives of adenine and guanine, 2-propyl and other alkyl derivatives of adenine and guanine, 2-thiouracil, 2-thiothymine and 2-thiocytosine, 5-halouracil and cytosine, 5-propynyl (—C═C-CH₃) uracil and cytosine and other alkynyl derivatives of pyrimidine bases, 6-azo uracil, cytosine and thymine, 5-uracil (pseudouracil), 4-thiouracil, 8-halo, 8-amino, 8-thiol, 8-thioalkyl, 8-hydroxyl and other 8-substituted adenines and guanines, 5-halo particularly 5-bromo, 5-trifluoromethyl and other 5-substituted uracils and cytosines, 7-methylguanine and 7-methyladenine, 2-F-adenine, 2-amino-adenine, 8-azaguanine and 8-azaadenine, 7-deazaguanine and 7-deazaadenine and 3-deazaguanine and 3-deazaadenine. Further modified nucleobases include tricyclic pyrimidines such as phenoxazine cytidine (1H-pyrimido(5,4-b)(1,4)benzoxazin-2(3H)-one), phenothiazine cytidine (1H-pyrimido(5,4-b)(1,4)benzothiazin-2(3H)-one), G-clamps such as a substituted phenoxazine cytidine (e.g. 9-(2-aminoethoxy)-H-pyrimido(5,4-(b) (1,4)benzoxazin-2(3H)-one), carbazole cytidine (2H-pyrimido(4,5-b)indol-2-one), pyridoindole cytidine (H-pyrido (3′,2′:4,5)pyrrolo(2,3-d)pyrimidin-2-one).

[0427] Heterocyclic base moieties may also include those in which the purine or pyrimidine base is replaced with other heterocycles, for example 7-deaza-adenine, 7-deazaguanosine, 2-aminopyridine and 2-pyridone. Further nucleobases include those disclosed in U.S. Pat. No. 3,687,808, those disclosed in The Concise Encyclopedia Of Polymer Science And Engineering, pages 858-859, Kroschwitz, J. I., ed. John Wiley & Sons, 1990, those disclosed by Englisch et al., Angewandte Chemie, International Edition, 1991, 30, 613, and those disclosed by Sanghvi, Y. S., Chapter 15, Antisense Research and Applications, pages 289-302, Crooke, S. T. and Lebleu, B., ed., CRC Press, 1993. Certain of these nucleobases are useful for increasing the binding affinity of an oligomeric compound. These include 5-substituted pyrimidines, 6-azapyrimidines and N-2, N-6 and O-6 substituted purines, including 2-aminopropyladenine, 5-propynyluracil and 5-propynylcytosine. 5-methylcytosine substitutions have been shown to increase nucleic acid duplex stability by 0.6-1.2° C. (Sanghvi et al., eds., Antisense Research and Applications, CRC Press, Boca Raton, 1993, pp. 276-278) and are suitable base substitutions, e.g., when combined with 2′-O-methoxyethyl sugar modifications.

[0428] Conjugates

[0429] Another possible modification of a subject nucleic acid involves chemically linking to the polynucleotide one or more moieties or conjugates which enhance the activity, cellular distribution or cellular uptake of the oligonucleotide. These moieties or conjugates can include conjugate groups covalently bound to functional groups such as primary or secondary hydroxyl groups. Conjugate groups include, but are not limited to, intercalators, reporter molecules, polyamines, polyamides, polyethylene glycols, polyethers, groups that enhance the pharmacodynamic properties of oligomers, and groups that enhance the pharmacokinetic properties of oligomers. Suitable conjugate groups include, but are not limited to, cholesterols, lipids, phospholipids, biotin, phenazine, folate, phenanthridine, anthraquinone, acridine, fluoresceins, rhodamines, coumarins, and dyes. Groups that enhance the pharmacodynamic properties include groups that improve uptake, enhance resistance to degradation, and/or strengthen sequence-specific hybridization with the target nucleic acid. Groups that enhance the pharmacokinetic properties include groups that improve uptake, distribution, metabolism or excretion of a subject nucleic acid.

[0430] Conjugate moieties include but are not limited to lipid moieties such as a cholesterol moiety (Letsinger et al., Proc. Natl. Acad. Sci. USA, 1989, 86, 6553-6556), cholic acid (Manoharan et al., Bioorg. Med. Chem. Let., 1994, 4, 1053-1060), a thioether, e.g., hexyl-S-tritylthiol (Manoharan et al., Ann. N.Y. Acad. Sci., 1992, 660, 306-309; Manoharan et al., Bioorg. Med. Chem. Let., 1993, 3, 2765-2770), a thiocholesterol (Oberhauser et al., Nucl. Acids Res., 1992, 20, 533-538), an aliphatic chain, e.g., dodecandiol or undecyl residues (Saison-Behmoaras et al., EMBO J., 1991, 10, 1111-1118; Kabanov et al., FEBS Lett., 1990, 259, 327-330; Svinarchuk et al., Biochimie, 1993, 75, 49-54), a phospholipid, e.g., di-hexadecyl-rac-glycerol or triethylammonium 1,2-di-O-hexadecyl-rac-glycero-3-H-phosphonate (Manoharan et al., Tetrahedron Lett., 1995, 36, 3651-3654; Shea et al., Nucl. Acids Res., 1990, 18, 3777-3783), a polyamine or a polyethylene glycol chain (Manoharan et al., Nucleosides & Nucleotides, 1995, 14, 969-973), or adamantane acetic acid (Manoharan et al., Tetrahedron Lett., 1995, 36, 3651-3654), a palmityl moiety (Mishra et al., Biochim. Biophys. Acta, 1995, 1264, 229-237), or an octadecylamine or hexylamino-carbonyl-oxycholesterol moiety (Crooke et al., J. Pharmacol. Exp. Ther., 1996, 277, 923-937.

[0431] A conjugate may include a “Protein Transduction Domain” or PTD (also known as a CPP— cell penetrating peptide), which may refer to a polypeptide, polynucleotide, carbohydrate, or organic or inorganic compound that facilitates traversing a lipid bilayer, micelle, cell membrane, organelle membrane, or vesicle membrane. A PTD attached to another molecule, which can range from a small polar molecule to a large macromolecule and/or a nanoparticle, facilitates the molecule traversing a membrane, for example going from extracellular space to intracellular space, or cytosol to within an organelle. In some cases, a PTD attached to another molecule facilitates entry of the molecule into the nucleus (e.g., in some cases, a PTD includes a nuclear localization signal). In some embodiments, a PTD is covalently linked to the amino terminus of an exogenous polypeptide (e.g., a Cas9 polypeptide). In some embodiments, a PTD is covalently linked to the carboxyl terminus of an exogenous polypeptide (e.g., a Cas9 polypeptide). In some embodiments, a PTD is covalently linked to the amino terminus and to the carboxyl terminus of an exogenous polypeptide (e.g., a Cas9 polypeptide). In some embodiments, a PTD is covalently linked to a nucleic acid (e.g., a guide nucleic acid, a polynucleotide encoding a guide nucleic acid, a polynucleotide encoding a Cas9 polypeptide, etc.). Exemplary PTDs include but are not limited to a minimal undecapeptide protein transduction domain (corresponding to residues 47-57 of HIV-1 TAT comprising YGRKKRRQRRR; SEQ ID NO:264); a polyarginine sequence comprising a number of arginines sufficient to direct entry into a cell (e.g., 3, 4, 5, 6, 7, 8, 9, 10, or 10-50 arginines); a VP22 domain (Zender et al. (2002) Cancer Gene Ther. 9(6):489-96); an Drosophila Antennapedia protein transduction domain (Noguchi et al. (2003) Diabetes 52(7):1732-1737); a truncated human calcitonin peptide (Trehin et al. (2004) Pharm. Research 21:1248-1256); polylysine (Wender et al. (2000) Proc. Natl. Acad. Sci. USA 97:13003-13008);

(SEQ ID NO: 265)
RRQRRTSKLMKR; Transportan
(SEQ ID NO: 266)
GWTLNSAGYLLGKINLKALAALAKKIL;
(SEQ ID NO: 267)
KALAWEAKLAKALAKALAKHLAKALAKALKCEA;
and
(SEQ ID NO: 268)
RQIKIWFQNRRMKWKK.

Exemplary PTDs include but are not limited to, YGRKKRRQRRR (SEQ ID NO:264), RKKRRQRRR (SEQ ID NO:269); an arginine homopolymer of from 3 arginine residues to 50 arginine residues; Exemplary PTD domain amino acid sequences include, but are not limited to, any of the following

(SEQ ID NO: 264)
YGRKKRRQRRR;
(SEQ ID NO: 270)
RKKRRQRR;
(SEQ ID NO: 271)
YARAAARQARA;
(SEQ ID NO: 272)
THRLPRRRRRR;
and
(SEQ ID NO: 273)
GGRRARRRRRR.

In some embodiments, the PTD is an activatable CPP (ACPP) (Aguilera et al. (2009) Integr Biol (Camb) June; 1(5-6): 371-381). ACPPs comprise a polycationic CPP (e.g., Arg9 or “R9”) connected via a cleavable linker to a matching polyanion (e.g., Glu9 or “E9”), which reduces the net charge to nearly zero and thereby inhibits adhesion and uptake into cells. Upon cleavage of the linker, the polyanion is released, locally unmasking the polyarginine and its inherent adhesiveness, thus “activating” the ACPP to traverse the membrane.

### Additional Examples

[0432] Additional targeters, activators, Cas9 polypeptides (including variant Cas9 polypeptides), and methods of using the same, can be found in the literature (see, for example, Chylinski et al., RNA Biol. 2013 May; 10(5):726-37; Jinek et al., Science. 2012 Aug. 17; 337(6096):816-21; Ma et al., Biomed Res Int. 2013; 2013:270805; Hou et al., Proc Natl Acad Sci USA. 2013 Sep. 24; 110(39):15644-9; Jinek et al., Elife. 2013; 2:e00471; Pattanayak et al., Nat Biotechnol. 2013 September; 31(9):839-43; Qi et al, Cell. 2013 Feb. 28; 152(5):1173-83; Wang et al., Cell. 2013 May 9; 153(4):910-8; Auer et. al., Genome Res. 2013 Oct. 31; Chen et. al., Nucleic Acids Res. 2013 Nov. 1; 41(20):e19; Cheng et. al., Cell Res. 2013 October; 23(10):1163-71; Cho et. al., Genetics. 2013 November; 195(3):1177-80; DiCarlo et al., Nucleic Acids Res. 2013 April; 41(7):4336-43; Dickinson et. al., Nat Methods. 2013 October; 10(10):1028-34; Ebina et. al., Sci Rep. 2013; 3:2510; Fujii et. al, Nucleic Acids Res. 2013 Nov. 1; 41(20):e187; Hu et. al., Cell Res. 2013 November; 23(11):1322-5; Jiang et. al., Nucleic Acids Res. 2013 Nov. 1; 41(20):e188; Larson et. al., Nat Protoc. 2013 November; 8(11):2180-96; Mali et. al., Nat Methods. 2013 October; 10(10):957-63; Nakayama et. al., Genesis. 2013 December; 51(12):835-43; Ran et. al., Nat Protoc. 2013 November; 8(11):2281-308; Ran et. al., Cell. 2013 Sep. 12; 154(6):1380-9; Upadhyay et. al., G3 (Bethesda). 2013 Dec. 9; 3(12):2233-8; Walsh et. al., Proc Natl Acad Sci USA. 2013 Sep. 24; 110(39):15514-5; Xie et. al., Mol Plant. 2013 Oct. 9; Yang et. al., Cell. 2013 Sep. 12; 154(6):1370-9; all of which are hereby incorporated by reference in their entirety).

### Methods

[0433] The present disclosure provides methods for cleaving a single stranded target nucleic acid (and/or modifying a polypeptide associated with a single stranded target nucleic acid). The present disclosure provides methods for binding a single stranded target nucleic acid (and/or modifying a polypeptide associated with a single stranded target nucleic acid). Generally, a subject method of cleaving involves contacting a single stranded target nucleic acid with (e.g., by introducing into a cell) a subject PAMmer, a guide nucleic acid, and a Cas9 polypeptide (e.g., a wild type Cas9 polypeptide, a variant Cas9 polypeptide, a variant Cas9 polypeptide with reduced nuclease activity, etc.). Generally, a subject method of binding involves contacting a single stranded target nucleic acid with (e.g., by introducing into a cell), a guide nucleic acid and a Cas9 polypeptide (e.g., a wild type Cas9 polypeptide, a variant Cas9 polypeptide, a variant Cas9 polypeptide with reduced nuclease activity, etc.). In some cases, a method of binding also includes contacting a single stranded target nucleic acid with a subject PAMmer. In some cases, the PAMmer has a specificity segment and does not have an orientation segment. In some cases, the PAMmer has an orientation segment and does not have a specificity segment. In some cases, the PAMmer has a specificity segment and an orientation segment.

[0434] In some embodiments of the subject methods, the target nucleic acid is inside of a cell (which can be referred to as a “host cell” or a “target cell”). In some cases, the method involves contacting a cell with (e.g., introducing into a cell) a subject PAMmer (or a nucleic acid encoding the same), and/or guide nucleic acid (or a nucleic acid encoding the same), and/or Cas9 polypeptide (or a nucleic acid encoding the same). In some embodiments of the subject methods, the host cell provides one or more of the components (e.g., the cell can be genetically modified to express a Cas9 polypeptide and/or a guide nucleic acid (or a component of a dual guide nucleic acid) and/or a PAMmer). In some such cases, the methods therefore include adding those components not provided by the host cell. For example, if the host cell is genetically modified to express a Cas9 polypeptide, the method can include introducing into the cell a guide nucleic acid and/or a PAMmer (which would therefore constitute a method of contacting a target nucleic acid with a Cas9 polypeptide, a guide nucleic acid, and/or a PAMmer).

[0435] As discussed above, a subject guide nucleic acid and a subject Cas9 polypeptide form a complex. The guide nucleic acid provides target specificity to the complex by comprising a nucleotide sequence that is complementary to a sequence of a target nucleic acid. The Cas9 polypeptide of the complex provides the site-specific activity. When the target nucleic acid is a single stranded target nucleic acid, a PAMmer provides a PAM sequence that activates the Cas9 polypeptide. In some embodiments, a subject complex cleaves a target nucleic acid.

[0436] In some cases, the Cas9 polypeptide exhibits nuclease activity that cleaves target nucleic acid at a target nucleic acid sequence (target site) defined by: (i) the region of complementarity between the guide nucleic acid and the target nucleic acid; and/or (ii) the region of complementarity between the target nucleic acid and the orientation segment of the PAMmer. A Cas9 polypeptide is activated by the presence of a PAM sequence adjacent to the target site and a single stranded target nucleic acid does not have a PAM sequence. As defined and discussed above, a subject PAMmer facilitates the cleavage of a single stranded target nucleic acid by providing a PAM sequence (anchored into an appropriate position by the orientation segment and/or the specificity segment of the PAMmer, see FIG. 8).

[0437] In some embodiments, when the method is a method of binding, the target nucleic acid can be contacted with a variant Cas9 polypeptide that has reduced nuclease activity (as described above). Such a Cas9 polypeptide can still bind to target nucleic acids in a sequence-specific manner, but the binding does not result in cleavage of the target nucleic acid. Thus, methods of binding can be used to isolate, collect, and/or analyze single stranded target nucleic acids in a sequence-specific manner. A Cas9 polypeptide (e.g., a variant Cas9 polypeptide that has reduced nuclease activity) can bind to a single stranded target nucleic acid in the presence of a guide nucleic acid, in the absence of a PAMmer. However, in some cases, a PAMmer increases the efficiency of biding between the complex and the target nucleic acid. As such, in some cases, a method of binding a single stranded target nucleic acid does not include a PAMmer. In some cases, a method of binding a single stranded target nucleic acid does include a PAMmer.

[0438] Where the method is a method of binding, in some cases, the targeting segment of the guide nucleic does not need to have complementarity to the region of the target nucleic acid that will be bound (i.e., the target site). For example, in some such cases, the orientation segment of the PAMmer determines the target site of the target nucleic acid (i.e., in such cases, the target site is not defined by complementarity to the guide nucleic acid). For example, in some cases, for a method of binding, when the PAMmer does not have a specificity segment, the guide nucleic acid need not have complementarity to the target nucleic acid, and the binding of the Cas9 polypeptide to the target nucleic acid is determined by the orientation segment of the PAMmer. In other words, a Cas9 polypeptide:guide nucleic acid complex can bind to a single stranded target nucleic acid when the orientation segment of the PAMmer binds to the target nucleic acid, and the complex does not require that the targeting segment of the guide nucleic acid has complementarity to the target nucleic acid (see FIGS. 5 and 8). Without being bound by theory, this is believed to be because the target is a single stranded target and no strand needs to be displaced from the target site (which is not the case when a PAMmer has a specificity segment). This can be advantageous, for example, when simultaneously targeting multiple different single stranded target nucleic acids because one would need only to provide the appropriate PAMmers (each having a PAM sequence and an orientation segment of interest), but would not need to provide multiple different matched (i.e., cognate) guide nucleic acids because the same guide nucleic acid will allow for binding of all targeted single stranded target nucleic acids (because the PAMmers provided that target specificity via the orientation segments).

[0439] As another example, in some cases (e.g., for a method of binding), when the PAMmer has a specificity segment that is 10 nucleotides (nt) or less (e.g., 9 nt or less, 8 nt or less, 7 nt or less, 6 nt or less, 5 nt or less, 4 nt or less, 3 nt or less, 2 nt or less, or 1 nt or less), the guide nucleic acid need not have complementarity to the target nucleic acid, and the binding of the Cas9 polypeptide to the target nucleic acid can be determined by the orientation segment of the PAMmer (i.e., the Cas9 polypeptide:guide nucleic acid complex will bind to a single stranded target nucleic acid when the orientation segment of the PAMmer binds to the target nucleic acid).

[0440] In some cases, in addition to contacting a target nucleic acid with a guide nucleic acid, a variant Cas9 (with reduced nuclease activity) (which produces a variant-Cas9/target complex), and/or a PAMmer (which can increase the efficiency of binding of a Cas9 polypeptide (e.g. a variant Cas9 polypeptide):guide nucleic acid complex with a target nucleic acid), a subject method further includes isolating the variant-Cas9/target complex, and collecting and/or analyzing the single stranded target nucleic acid and/or a polypeptide (or polypeptides) associated with the single stranded target nucleic acid. In some cases, the method includes, prior to collecting and/or analyzing, releasing the single stranded target nucleic acid from the variant-Cas9/target complex. In some cases, variant-Cas9/target complex, once formed, self dissociates. For example, in some cases, the variant Cas9 polypeptide has a fusion partner (e.g., a fusion partner having enzymatic activity) that modifies the target nucleic acid, and once modified the variant-Cas9/target complex dissociates.

[0441] A variant-Cas9/target complex can be isolated by any convenient method. For example, the variant-Cas9/target complex can be isolated by immunoprecipitation (e.g., using an antibody against the Cas9 polypeptide and/or using a labeled Cas9 polypeptide)(various labels are described above). As one non-limiting example, the Cas9 polypeptide can be labeled with biotin then immobilized on a solid support (e.g. agarose-streptavidin), and the RNA can be isolated and/or analyzed (e.g., via column chromatography, via RNA purification and sequencing, etc.). In some cases, the target nucleic acid will also be bound by other nucleic acids and/or proteins there were present prior to contacting with a Cas9 polypeptide. In some such cases, after a subject binding method is performed, the target nucleic acid remains bound to the other nucleic acids and/or proteins (e.g., proteins and/or nucleic acids of a cell that normally interact with the target nucleic acid). As such, a subject binding method can be used to study the molecules (e.g., nucleic acids and/or proteins) that interact with any target nucleic acid of interest.

[0442] In addition, a method of binding can be used to visualize the target nucleic acid (e.g., visualize the subcellular distribution of a target nucleic acid). Because the Cas9/guide nucleic acid/PAMmer form a complex at a targeted site of a target single stranded nucleic acid, any one of the components (the Cas9 polypeptide, the guide nucleic acid, the PAMmer, etc.) can be detectably labeled (i.e., can have an indirect and/or direct label moiety, defined above) in order to visualize the complex. The term “detectable label” includes directly and/or indirectly detectable labels. In some cases, a guide nucleic acid and/or a PAMmer can have a label moiety that can be indirectly detected (an RNA aptamer, a nucleic acid sequence that is bound by a labeled protein, biotin, etc.) and/or directly detected (e.g., a fluorescent dye).

[0443] In some instances, one or more components (e.g, a target nucleic acid, a PAMmer, a guide nucleic acid, and/or a Cas9 polypeptide) is labeled with (e.g., linked to) a donor molecule, while another component is labeled with (e.g., linked to) an acceptor molecule, and detection of an association between the labeled components is by fluorescence resonance energy transfer (also referred to as “Förster resonance energy transfer” or “FRET”).

[0444] FRET is phenomenon wherein excitation of one emissive dye is transferred to another without emission of a photon. A FRET pair consists of a donor chromophore and an acceptor chromophore (where the acceptor chromophore may be a quencher molecule). The emission spectrum of the donor and the absorption spectrum of the acceptor must overlap, and the two molecules must be in close proximity. The distance between donor and acceptor at which 50% of donors are deactivated (transfer energy to the acceptor) is defined by the Förster radius, which is typically 10-100 angstroms. Changes in the emission spectrum comprising FRET pairs can be detected, indicating changes in the number of that are in close proximity (i.e., within 100 angstroms of each other). This will typically result from the binding or dissociation of two molecules, one of which is labeled with a FRET donor and the other of which is labeled with a FRET acceptor, wherein such binding brings the FRET pair in close proximity.

[0445] Binding of such molecules will result in an increased emission of the acceptor and/or quenching of the fluorescence emission of the donor. FRET pairs (donor/acceptor) suitable for use include, but are not limited to, EDANS/fluorescein, IAEDANS/fluorescein, fluorescein/tetramethylrhodamine, fluorescein/Cy 5, IEDANS/DABCYL, fluorescein/QSY-7, fluorescein/LC Red 640, fluorescein/Cy 5.5 and fluorescein/LC Red 705. In addition, a fluorophore/quantum dot donor/acceptor pair can be used. EDANS is (5-((2-Aminoethyl)amino)naphthalene-1-sulfonic acid); IAEDANS is 5-({2-[(iodoacetyl)amino]ethyl}amino)naphthalene-1-sulfonic acid); DABCYL is 4-(4-dimethylaminophenyl) diazenylbenzoic acid.

[0446] Cy3, Cy5, Cy 5.5, and the like, are cyanines. For example, Cy3 and Cy5 are reactive water-soluble fluorescent dyes of the cyanine dye family. Cy3 dyes are red (˜550 nm excitation, ˜570 nm emission and therefore appear green), while Cy5 is fluorescent in the red region (˜650/670 nm) but absorbs in the orange region (˜649 nm). Alexa Fluor dyes, Dylight, IRIS Dyes, Seta dyes, SeTau dyes, SRfluor dyes and Square dyes can also be used.

[0447] In another aspect of FRET, an emissive donor molecule and a nonemissive acceptor molecule (“quencher”) may be employed. In this application, emission of the donor will increase when quencher is displaced from close proximity to the donor and emission will decrease when the quencher is brought into close proximity to the donor. Useful quenchers include, but are not limited to, DABCYL, QSY 7 and QSY 33. Useful fluorescent donor/quencher pairs include, but are not limited to EDANS/DABCYL, Texas Red/DABCYL, BODIPY/DABCYL, Lucifer yellow/DABCYL, coumarin/DABCYL and fluorescein/QSY 7 dye.

[0448] In some instances, one or more components (e.g, a target nucleic acid, a PAMmer, a guide nucleic acid, and/or a Cas9 polypeptide) is labeled with (e.g., linked to, fused with, bound by, etc.) a first member of a split fluorphore, while another component is labeled with (e.g., linked to, fused with, bound by, etc.) a second member of a split fluorphore, and detection of the fluorophore can occur when the first and second split fluorophores are brought into close proximity. For example, in some cases, a Cas9 polypeptide (or a guide nucleic acid) can be labeled with afirst member of a split fluorphore and the corresponding PAMmer can be labeled with a second member of the split fluorphore such that, when the Cas9/guide nucleic acid complex is brought into close proximity to the corresponding PAMmer (which occurs when both are binding to (associated with) the target nucleic acid), a signal can be detected. Any convenient split fluorophore can be used. For more information related to split fluorophores (e.g, a split-GFP), refer to Cabantous et al., Sci Rep. 2013 Oct. 4; 3:2854. doi: 10.1038/srep02854, which is hereby incorporated by reference in its entirety.

[0449] Multiple Guide Nucleic Acids and/or PAMmers

[0450] In some embodiments, multiple guide nucleic acids and multiple PAMmers are used to simultaneously cleave and/or bind multiple different target nucleic acids or multiple different locations on the same target nucleic. For example, for methods of binding, each targeting pair (a PAMmer and a guide nucleic acid) can have a detectable label that is distinguishable from another targeting pair, and thus, multiple different target nucleic acids can be simultaneously bound (e.g., visualized). In some embodiments, two or more guide nucleic acids (and PAMmers) target the same gene or transcript or locus. In some embodiments, two or more guide nucleic acids (and PAMmers) target different unrelated target nucleic acids. In some embodiments, two or more guide nucleic acids (and PAMmers) target different, but related target nucleic acids.

[0451] Because the guide nucleic acids and PAMmers are small and robust multiple guide nucleic acids and/or multiple PAMmers (e.g., when a PAMmer is transcribed from DNA) can be simultaneously present on the same expression vector and can even be under the same transcriptional control if so desired. In some embodiments, two or more (e.g., 3 or more, 4 or more, 5 or more, 10 or more, 15 or more, 20 or more, 25 or more, 30 or more, 35 or more, 40 or more, 45 or more, or 50 or more) guide nucleic acids (and/or PAMmers) are simultaneously expressed in a target cell (from the same or different vectors). The expressed guide nucleic acids (and/or PAMmers) can be differentially recognized by Cas9 proteins from different bacteria, such as S. pyogenes, S. thermophilus, L. innocua, and N. meningitidis.

[0452] In some cases (e.g., when a PAMmer is DNA or a modified nucleic acid (i.e., is not transcribed from DNA)), the PAMmer(s) can be introduced directly (e.g, transfected into a cell), which is also the case when using a single PAMmer (and/or a single guide nucleic acid).

[0453] To express multiple guide nucleic acids (and/or PAMmers), an artificial RNA processing system mediated by the Csy4 endoribonuclease can be used. Multiple guide nucleic acids can be concatenated into a tandem array on a precursor transcript (e.g., expressed from a U6 promoter), and separated by Csy4-specific RNA sequence. Co-expressed Csy4 protein cleaves the precursor transcript into multiple guide nucleic acids (and/or PAMmers). Advantages for using an RNA processing system include: first, there is no need to use multiple promoters; second, since all guide nucleic acids (and/or PAMmers) are processed from a precursor transcript, their concentrations are normalized for similar Cas9-binding.

[0454] Csy4 is a small endoribonuclease (RNase) protein derived from bacteria Pseudomonas aeruginosa. Csy4 specifically recognizes a minimal 17-bp RNA hairpin, and exhibits rapid (<1 min) and highly efficient (>99.9% or more) RNA cleavage Unlike most RNases, the cleaved RNA fragment remains stable and functionally active. The Csy4-based RNA cleavage can be repurposed into an artificial RNA processing system. In this system, the 17-bp RNA hairpins are inserted between multiple RNA fragments that are transcribed as a precursor transcript from a single promoter. Co-expression of Csy4 is effective in generating individual RNA fragments.

[0455] In some embodiments (e.g., in some cases where the Cas9 polypeptide is a chimeric Cas9 polypeptide), a subject complex modifies a target polypeptide associated with target nucleic acid (e.g., a histone, a DNA-binding protein, an RNA-binding protein, an RNA editing protein etc.), leading to, for example, protein methylation, protein acetylation, protein ubiquitination, and the like. The target nucleic acid may be, for example, a single stranded nucleic acid outside of a cell in vitro, a single stranded nucleic acid inside of a cell in vitro, a single stranded nucleic acid inside of a cell ex vivo, or a single stranded nucleic acid inside of a cell in vivo. The nuclease activity cleaves single stranded target nucleic acid, causing degradation of, and a reduction in the levels of, the target nucleic acid.

[0456] For methods of cleaving and/or binding a single stranded target nucleic acid, in some cases, different Cas9 proteins (i.e., Cas9 proteins from various species) may be advantageous to use in the various provided methods in order to capitalize on various enzymatic characteristics of the different Cas9 proteins (e.g., for different PAM sequence preferences; for increased or decreased enzymatic activity; for an increased or decreased level of cellular toxicity; etc.). Cas9 proteins from various species (see SEQ ID NOs:1-256 and 795-1346) may require different PAM sequences. Thus, for a particular Cas9 protein of choice, the PAM sequence requirement may be different than the PAM sequences described above (e.g., 5′-NGG-3′, GG, etc.).

[0457] In some embodiments, a subject guide nucleic acid and a subject Cas9 polypeptide are used as an inducible system for shutting off gene expression in cells. For example, in some cases, nucleic acids encoding an appropriate guide nucleic acid and/or an appropriate Cas9 polypeptide and/or a PAMmer can be incorporated into the chromosome of a target cell and are under control of an inducible promoter. When the guide nucleic acid and/or the PAMmer and/or the site-directed polypeptide are induced, the target nucleic acid is cleaved (or otherwise modified) at the location of interest, when the PAMmer, the guide nucleic acid and the Cas9 polypeptide are present and bind the single stranded target nucleic acid. As such, in some cases, cells are engineered to include nucleic acid sequences encoding an appropriate Cas9 polypeptide in the genome and/or an appropriate guide nucleic acid (e.g., on a plasmid, e.g., under control of an inducible promoter), allowing experiments in which the expression of any targeted gene (expressed from a separate plasmid introduced into the cell) could be controlled by inducing expression of the guide nucleic acid and the site-directed polypeptide. The PAMmer can be provided by the experimenter if the PAMmer is a DNA (or a modified nucleic acid), and can be transcribed in the cell if the PAMmer is an RNA.

[0458] In some cases, the Cas9 polypeptide has enzymatic activity that modifies target nucleic acid in ways other than introducing strand cleavage. Enzymatic activity of interest that may be used to modify target nucleic acid (e.g., by fusing a heterologous polypeptide with enzymatic activity to a Cas9 polypeptide, thereby generating a chimeric Cas9 polypeptide) includes, but is not limited methyltransferase activity, demethylase activity, DNA repair activity, DNA damage activity, deamination activity, dismutase activity, alkylation activity, depurination activity, oxidation activity, pyrimidine dimer forming activity, integrase activity, transposase activity, recombinase activity, polymerase activity, ligase activity, helicase activity, photolyase activity or glycosylase activity).

[0459] In some cases, the Cas9 polypeptide has activity that modulates the production of a protein encoded by a single stranded target nucleic acid (e.g., mRNA) (e.g., by cleaving and thereby degrading the mRNA). In some cases, the subject method is used to cleave a targeted coding-RNA (protein-encoding gene) and/or a targeted non-coding RNA (e.g., tRNA, rRNA, snoRNA, siRNA, miRNA, long ncRNA, etc.).

[0460] In some cases, the Cas9 polypeptide has enzymatic activity that modifies a polypeptide associated with a target nucleic acid (e.g. a histone, a DNA-binding protein, an RNA-binding protein, an RNA editing protein and the like). In some embodiments, the enzymatic activity is methyltransferase activity, demethylase activity, acetyltransferase activity, deacetylase activity, kinase activity, phosphatase activity, ubiquitin ligase activity (i.e., ubiquitination activity), deubiquitinating activity, adenylation activity, deadenylation activity, SUMOylating activity, deSUMOylating activity, ribosylation activity, deribosylation activity, myristoylation activity, demyristoylation activity glycosylation activity (e.g., from O-GlcNAc transferase) or deglycosylation activity. The enzymatic activities listed herein catalyze covalent modifications to proteins. Such modifications are known in the art to alter the stability or activity of the target protein (e.g., phosphorylation due to kinase activity can stimulate or silence protein activity depending on the target protein).

### Target Cells of Interest

[0461] In some of the above applications, the subject methods may be employed to induce target nucleic acid cleavage, target nucleic acid modification, and/or to bind target nucleic acids (e.g., for visualization, for collecting and/or analyzing, etc.) in mitotic or post-mitotic cells in vivo and/or ex vivo and/or in vitro (e.g., to disrupt production of a protein encoded by a targeted mRNA). Because the guide nucleic acid provides specificity by hybridizing to target nucleic acid, a mitotic and/or post-mitotic cell of interest in the disclosed methods may include a cell from any organism (e.g. a bacterial cell, an archaeal cell, a cell of a single-cell eukaryotic organism, a plant cell, an algal cell, e.g., Botryococcus braunii, Chlamydomonas reinhardtii, Nannochloropsis gaditana, Chlorella pyrenoidosa, Sargassum patens C. Agardh, and the like, a fungal cell (e.g., a yeast cell), an animal cell, a cell from an invertebrate animal (e.g. fruit fly, cnidarian, echinoderm, nematode, etc.), a cell from a vertebrate animal (e.g., fish, amphibian, reptile, bird, mammal), a cell from a mammal, a cell from a rodent, a cell from a human, etc.).

[0462] Any type of cell may be of interest (e.g. a stem cell, e.g. an embryonic stem (ES) cell, an induced pluripotent stem (iPS) cell, a germ cell; a somatic cell, e.g. a fibroblast, a hematopoietic cell, a neuron, a muscle cell, a bone cell, a hepatocyte, a pancreatic cell; an in vitro or in vivo embryonic cell of an embryo at any stage, e.g., a 1-cell, 2-cell, 4-cell, 8-cell, etc. stage zebrafish embryo; etc.). Cells may be from established cell lines or they may be primary cells, where “primary cells”, “primary cell lines”, and “primary cultures” are used interchangeably herein to refer to cells and cells cultures that have been derived from a subject and allowed to grow in vitro for a limited number of passages, i.e. splittings, of the culture. For example, primary cultures are cultures that may have been passaged 0 times, 1 time, 2 times, 4 times, 5 times, 10 times, or 15 times, but not enough times go through the crisis stage. In some cases, the primary cell lines are maintained for fewer than 10 passages in vitro. Target cells are in many embodiments unicellular organisms, or are grown in culture.

[0463] If the cells are primary cells, they may be harvest from an individual by any convenient method. For example, leukocytes may be conveniently harvested by apheresis, leukocytapheresis, density gradient separation, etc., while cells from tissues such as skin, muscle, bone marrow, spleen, liver, pancreas, lung, intestine, stomach, etc. are most conveniently harvested by biopsy. An appropriate solution may be used for dispersion or suspension of the harvested cells. Such solution will generally be a balanced salt solution, e.g. normal saline, phosphate-buffered saline (PBS), Hank's balanced salt solution, etc., conveniently supplemented with fetal calf serum or other naturally occurring factors, in conjunction with an acceptable buffer at low concentration, generally from 5-25 mM. Convenient buffers include HEPES, phosphate buffers, lactate buffers, etc. The cells may be used immediately, or they may be stored, frozen, for long periods of time, being thawed and capable of being reused. In such cases, the cells will usually be frozen in 10% or more DMSO, 50% or more serum, and about 40% buffered medium, or some other such solution as is commonly used in the art to preserve cells at such freezing temperatures, and thawed in a manner as commonly known in the art for thawing frozen cultured cells.

Introducing Components into a Target Cell

[0464] A guide nucleic acid (or a nucleic acid comprising a nucleotide sequence encoding same), a PAMmer (or a nucleic acid comprising a nucleotide sequence encoding same), and/or a Cas9 polypeptide (or a nucleic acid comprising a nucleotide sequence encoding same) can be introduced into a host cell by any of a variety of well-known methods. Similarly, where a subject method involves introducing into a host cell a nucleic acid comprising a nucleotide sequence encoding a variant Cas9 polypeptide, such a nucleic acid can be introduced into a host cell by any of a variety of well-known methods.

[0465] Methods of introducing a nucleic acid into a host cell are known in the art, and any known method can be used to introduce a nucleic acid (e.g., an expression construct) into a stem cell or progenitor cell. Suitable methods include, include e.g., viral or bacteriophage infection, transfection, conjugation, protoplast fusion, lipofection, electroporation, calcium phosphate precipitation, polyethyleneimine (PEI)-mediated transfection, DEAE-dextran mediated transfection, liposome-mediated transfection, particle gun technology, calcium phosphate precipitation, direct micro injection, nanoparticle-mediated nucleic acid delivery (see, e.g., Panyam et., al Adv Drug Deliv Rev. 2012 Sep. 13. pii: S0169-409X(12)00283-9. doi: 10.1016/j.addr.2012.09.023), and the like.

[0466] For methods of cleaving and/or binding a single stranded target nucleic acid, in some cases, the Cas9 polypeptide is provided as a nucleic acid (e.g., an mRNA, a DNA, a plasmid, an expression vector, etc.) that encodes the Cas9 protein. In some cases, the Cas9 polypeptide is provided directly as a protein. As one non-limiting example, fungi (e.g., yeast) can be transformed with exogenous protein and/or nucleic acid using spheroplast transformation (see Kawai et al., Bioeng Bugs. 2010 November-December; 1(6):395-403: “Transformation of Saccharomyces cerevisiae and other fungi: methods and possible underlying mechanism”; and Tanka et al., Nature. 2004 Mar. 18; 428(6980):323-8: “Conformational variations in an infectious protein determine prion strain differences”; both of which are herein incorporated by reference in their entirety). Thus, a Cas9 polypeptide (e.g., Cas9) can be incorporated into a spheroplast (with or without nucleic acid encoding a guide nucleic acid and with or without a donor polynucleotide) and the spheroplast can be used to introduce the content into a yeast cell. A Cas9 polypeptide can be introduced into a cell (provided to the cell) by any convenient method; such methods are known to those of ordinary skill in the art. As another non-limiting example, a Cas9 polypeptide can be injected directly into a cell (e.g., with or without nucleic acid encoding a guide nucleic acid and with or without a donor polynucleotide), e.g., a cell of a zebrafish embryo, the pronucleus of a fertilized mouse oocyte, etc.

### Genetically Modified Host Cells

[0467] In some embodiments, a genetically modified host cell has been genetically modified with an exogenous nucleic acid comprising a nucleotide sequence encoding a Cas9 polypeptide (e.g., a naturally occurring Cas9; a modified, i.e., mutated or variant, Cas9; a chimeric Cas9; etc.). Single stranded nucleic acids of the genetically modified host cell can be targeted for modification by introducing into the cell a guide nucleic acid (or a DNA encoding a guide nucleic acid, which determines the genomic location/sequence to be modified) and a PAMmer (or a nucleic acid encoding a PAMmer). In some embodiments, the nucleotide sequence encoding a Cas9 polypeptide is operably linked to an inducible promoter (e.g., heat shock promoter, Tetracycline-regulated promoter, Steroid-regulated promoter, Metal-regulated promoter, estrogen receptor-regulated promoter, etc.). In some embodiments, the nucleotide sequence encoding a Cas9 polypeptide is operably linked to a spatially restricted and/or temporally restricted promoter (e.g., a tissue specific promoter, a cell type specific promoter, etc.). In some embodiments, the nucleotide sequence encoding a Cas9 polypeptide is operably linked to a constitutive promoter.

[0468] In some embodiments, a subject genetically modified host cell is in vitro. In some embodiments, a subject genetically modified host cell is in vivo. In some embodiments, a subject genetically modified host cell is a prokaryotic cell or is derived from a prokaryotic cell. In some embodiments, a subject genetically modified host cell is a bacterial cell or is derived from a bacterial cell. In some embodiments, a subject genetically modified host cell is an archaeal cell or is derived from an archaeal cell. In some embodiments, a subject genetically modified host cell is a eukaryotic cell or is derived from a eukaryotic cell. In some embodiments, a subject genetically modified host cell is a plant cell or is derived from a plant cell. In some embodiments, a subject genetically modified host cell is an animal cell or is derived from an animal cell. In some embodiments, a subject genetically modified host cell is an invertebrate cell or is derived from an invertebrate cell. In some embodiments, a subject genetically modified host cell is a vertebrate cell or is derived from a vertebrate cell. In some embodiments, a subject genetically modified host cell is a mammalian cell or is derived from a mammalian cell. In some embodiments, a subject genetically modified host cell is a rodent cell or is derived from a rodent cell. In some embodiments, a subject genetically modified host cell is a human cell or is derived from a human cell.

[0469] The present disclosure further provides progeny of a subject genetically modified cell, where the progeny can comprise the same exogenous nucleic acid or polypeptide as the subject genetically modified cell from which it was derived. The present disclosure further provides a composition comprising a subject genetically modified host cell.

[0470] In other aspects of the disclosure, a PAMmer, and/or guide nucleic acid, and/or Cas9 polypeptide are employed to modify single stranded nucleic acid (sRNA, ssDNA) in vivo, for purposes such as gene therapy, e.g. to treat a disease or as an antiviral, antipathogenic, or anticancer therapeutic, or for biological research. In in vivo embodiments, a PAMmer, and/or guide nucleic acid, and/or Cas9 polypeptide are administered directly to the individual. A PAMmer, and/or guide nucleic acid, and/or Cas9 polypeptide may be administered by any of a number of well-known methods in the art for the administration of peptides, small molecules and nucleic acids to a subject. A PAMmer, and/or guide nucleic acid, and/or Cas9 polypeptide can be incorporated into a variety of formulations. More particularly, a PAMmer, and/or guide nucleic acid, and/or Cas9 polypeptide of the present disclosure can be formulated into pharmaceutical compositions by combination with appropriate pharmaceutically acceptable carriers or diluents.

[0471] Pharmaceutical preparations are compositions that include one or more of a PAMmer, and/or guide nucleic acid, and/or Cas9 polypeptide present in a pharmaceutically acceptable vehicle. “Pharmaceutically acceptable vehicles” may be vehicles approved by a regulatory agency of the Federal or a state government or listed in the U.S. Pharmacopeia or other generally recognized pharmacopeia for use in mammals, such as humans. The term “vehicle” refers to a diluent, adjuvant, excipient, or carrier with which an agent (e.g., one or more of a PAMmer, and/or guide nucleic acid, and/or Cas9 polypeptide) is formulated for administration to a mammal. Such pharmaceutical vehicles can be lipids, e.g. liposomes, e.g. liposome dendrimers; liquids, such as water and oils, including those of petroleum, animal, vegetable or synthetic origin, such as peanut oil, soybean oil, mineral oil, sesame oil and the like, saline; gum acacia, gelatin, starch paste, talc, keratin, colloidal silica, urea, and the like. In addition, auxiliary, stabilizing, thickening, lubricating and coloring agents may be used. Pharmaceutical compositions may be formulated into preparations in solid, semi-solid, liquid or gaseous forms, such as tablets, capsules, powders, granules, ointments, solutions, suppositories, injections, inhalants, gels, microspheres, and aerosols. As such, administration of the a PAMmer, and/or guide nucleic acid, and/or Cas9 polypeptide can be achieved in various ways, including oral, buccal, rectal, parenteral, intraperitoneal, intradermal, transdermal, intratracheal, intraocular, etc., administration. The active agent may be systemic after administration or may be localized by the use of regional administration, intramural administration, or use of an implant that acts to retain the active dose at the site of implantation. The active agent may be formulated for immediate activity or it may be formulated for sustained release.

[0472] For some conditions, particularly central nervous system conditions, it may be necessary to formulate agents to cross the blood-brain bather (BBB). One strategy for drug delivery through the blood-brain barrier (BBB) entails disruption of the BBB, either by osmotic means such as mannitol or leukotrienes, or biochemically by the use of vasoactive substances such as bradykinin. The potential for using BBB opening to target specific agents to brain tumors is also an option. A BBB disrupting agent can be co-administered with the therapeutic compositions of the present disclosure when the compositions are administered by intravascular injection. Other strategies to go through the BBB may entail the use of endogenous transport systems, including Caveolin-1 mediated transcytosis, carrier-mediated transporters such as glucose and amino acid carriers, receptor-mediated transcytosis for insulin or transferrin, and active efflux transporters such as p-glycoprotein. Active transport moieties may also be conjugated to the therapeutic compounds for use in the methods of the present disclosure, to facilitate transport across the endothelial wall of the blood vessel. Alternatively, drug delivery of therapeutics agents behind the BBB may be by local delivery, for example by intrathecal delivery, e.g. through an Ommaya reservoir (see e.g. U.S. Pat. Nos. 5,222,982 and 5,385,582, incorporated herein by reference); by bolus injection, e.g. by a syringe, e.g. intravitreally or intracranially; by continuous infusion, e.g. by cannulation, e.g. with convection (see e.g. US Application No. 20070254842, incorporated here by reference); or by implanting a device upon which the agent has been reversably affixed (see e.g. US Application Nos. 20080081064 and 20090196903, incorporated herein by reference).

[0473] Typically, an effective amount of a PAMmer, and/or guide nucleic acid, and/or Cas9 polypeptide are provided. As discussed above with regard to ex vivo methods, an effective amount or effective dose of a PAMmer, and/or guide nucleic acid, and/or Cas9 polypeptide in vivo is the amount sufficient to induce a 2 fold (or greater) reduction in the amount of intact target nucleic acid (for methods of cleaving) relative to a negative control, e.g. a cell contacted with an empty vector or irrelevant polypeptide. The amount of intact target nucleic acid may be measured by any convenient method, e.g. as described above and known in the art. The calculation of the effective amount or effective dose of a PAMmer, and/or guide nucleic acid, and/or Cas9 polypeptide to be administered is within the skill of one of ordinary skill in the art. The final amount to be administered will be dependent upon the route of administration and upon the nature of the disorder or condition that is to be treated.

[0474] The effective amount given to a particular patient will depend on a variety of factors, several of which will differ from patient to patient. A competent clinician will be able to determine an effective amount of a therapeutic agent to administer to a patient to halt or reverse the progression the disease condition as required. Utilizing LD50 animal data, and other information available for the agent, a clinician can determine the maximum safe dose for an individual, depending on the route of administration. For instance, an intravenously administered dose may be more than an intrathecally administered dose, given the greater body of fluid into which the therapeutic composition is being administered. Similarly, compositions which are rapidly cleared from the body may be administered at higher doses, or in repeated doses, in order to maintain a therapeutic concentration. Utilizing ordinary skill, the competent clinician will be able to optimize the dosage of a particular therapeutic in the course of routine clinical trials.

[0475] For inclusion in a medicament, a PAMmer, and/or guide nucleic acid, and/or Cas9 polypeptide may be obtained from a suitable commercial source. As a general proposition, the total pharmaceutically effective amount of a PAMmer, and/or guide nucleic acid, and/or Cas9 polypeptide administered parenterally per dose will be in a range that can be measured by a dose response curve.

[0476] Therapies based on the a PAMmer, and/or guide nucleic acid, and/or Cas9 polypeptide, i.e. preparations of a PAMmer, and/or guide nucleic acid, and/or Cas9 polypeptide to be used for therapeutic administration, must be sterile. Sterility is readily accomplished by filtration through sterile filtration membranes (e.g., 0.2 μm membranes). Therapeutic compositions generally are placed into a container having a sterile access port, for example, an intravenous solution bag or vial having a stopper pierceable by a hypodermic injection needle. The therapies based on a PAMmer, and/or guide nucleic acid, and/or Cas9 polypeptide may be stored in unit or multi-dose containers, for example, sealed ampules or vials, as an aqueous solution or as a lyophilized formulation for reconstitution. As an example of a lyophilized formulation, 10-mL vials are filled with 5 ml of sterile-filtered 1% (w/v) aqueous solution of compound, and the resulting mixture is lyophilized. The infusion solution is prepared by reconstituting the lyophilized compound using bacteriostatic Water-for-Injection.

[0477] Pharmaceutical compositions can include, depending on the formulation desired, pharmaceutically-acceptable, non-toxic carriers of diluents, which are defined as vehicles commonly used to formulate pharmaceutical compositions for animal or human administration. The diluent is selected so as not to affect the biological activity of the combination. Examples of such diluents are distilled water, buffered water, physiological saline, PBS, Ringer's solution, dextrose solution, and Hank's solution. In addition, the pharmaceutical composition or formulation can include other carriers, adjuvants, or non-toxic, nontherapeutic, nonimmunogenic stabilizers, excipients and the like. The compositions can also include additional substances to approximate physiological conditions, such as pH adjusting and buffering agents, toxicity adjusting agents, wetting agents and detergents.

[0478] The composition can also include any of a variety of stabilizing agents, such as an antioxidant for example. When the pharmaceutical composition includes a polypeptide, the polypeptide can be complexed with various well-known compounds that enhance the in vivo stability of the polypeptide, or otherwise enhance its pharmacological properties (e.g., increase the half-life of the polypeptide, reduce its toxicity, enhance solubility or uptake). Examples of such modifications or complexing agents include sulfate, gluconate, citrate and phosphate. The nucleic acids or polypeptides of a composition can also be complexed with molecules that enhance their in vivo attributes. Such molecules include, for example, carbohydrates, polyamines, amino acids, other peptides, ions (e.g., sodium, potassium, calcium, magnesium, manganese), and lipids.

[0479] Further guidance regarding formulations that are suitable for various types of administration can be found in Remington's Pharmaceutical Sciences, Mace Publishing Company, Philadelphia, Pa., 17th ed. (1985). For a brief review of methods for drug delivery, see, Langer, Science 249:1527-1533 (1990).

[0480] The pharmaceutical compositions can be administered for prophylactic and/or therapeutic treatments. Toxicity and therapeutic efficacy of the active ingredient can be determined according to standard pharmaceutical procedures in cell cultures and/or experimental animals, including, for example, determining the LD50 (the dose lethal to 50% of the population) and the ED50 (the dose therapeutically effective in 50% of the population). The dose ratio between toxic and therapeutic effects is the therapeutic index and it can be expressed as the ratio LD50/ED50. Therapies that exhibit large therapeutic indices are preferred.

[0481] The data obtained from cell culture and/or animal studies can be used in formulating a range of dosages for humans. The dosage of the active ingredient typically lines within a range of circulating concentrations that include the ED50 with low toxicity. The dosage can vary within this range depending upon the dosage form employed and the route of administration utilized.

[0482] The components used to formulate the pharmaceutical compositions are preferably of high purity and are substantially free of potentially harmful contaminants (e.g., National Food (NF) grade, generally analytical grade, and more typically pharmaceutical grade). Moreover, compositions intended for in vivo use are usually sterile. To the extent that a given compound must be synthesized prior to use, the resulting product is typically substantially free of any potentially toxic agents, particularly any endotoxins, which may be present during the synthesis or purification process. Compositions for parental administration are also sterile, substantially isotonic and made under Good Manufacturing Practices (GMP) conditions.

[0483] The effective amount of a therapeutic composition to be given to a particular patient will depend on a variety of factors, several of which will differ from patient to patient. A competent clinician will be able to determine an effective amount of a therapeutic agent to administer to a patient to halt or reverse the progression the disease condition as required. Utilizing LD50 animal data, and other information available for the agent, a clinician can determine the maximum safe dose for an individual, depending on the route of administration. For instance, an intravenously administered dose may be more than an intrathecally administered dose, given the greater body of fluid into which the therapeutic composition is being administered. Similarly, compositions which are rapidly cleared from the body may be administered at higher doses, or in repeated doses, in order to maintain a therapeutic concentration. Utilizing ordinary skill, the competent clinician will be able to optimize the dosage of a particular therapeutic in the course of routine clinical trials.

### Compositions

[0484] The present disclosure provides a composition comprising a PAMmer and at least one of: a subject guide nucleic acid and a subject Cas9 polypeptide. In some cases, the Cas9 polypeptide is a variant Cas9 polypeptide. In some cases, the Cas9 polypeptide is a chimeric Cas9 polypeptide. A subject composition is useful for carrying out a method of the present disclosure, e.g., a method for cleaving a single stranded target nucleic acid; a method for binding a single stranded target nucleic acid; etc.

### Compositions Comprising a Guide Nucleic Acid

[0485] The present disclosure provides a composition comprising a subject PAMmer and at least one of: a guide nucleic acid and a Cas9 polypeptide. The composition can comprise, in addition, one or more of: a salt, e.g., NaCl, MgCl₂, KCl, MgSO₄, etc.; a buffering agent, e.g., a Tris buffer, N-(2-Hydroxyethyl)piperazine-N′-(2-ethanesulfonic acid) (HEPES), 2-(N-Morpholino)ethanesulfonic acid (MES), MES sodium salt, 3-(N-Morpholino)propanesulfonic acid (MOPS), N-tris[Hydroxymethyl]methyl-3-aminopropanesulfonic acid (TAPS), etc.; a solubilizing agent; a detergent, e.g., a non-ionic detergent such as Tween-20, etc.; a nuclease inhibitor; and the like. For example, in some cases, a subject composition comprises a subject guide nucleic acid and a buffer for stabilizing nucleic acids.

[0486] In some embodiments, PAMmer and/or a guide nucleic acid and/or a Cas9 polypeptide is present in a subject composition is pure, e.g., 75% or more, 80% or more, 85% or more, 90% or more, 95% or more, 98% or more, 99% or more, or more than 99% or more pure, where “% or more purity” means that guide nucleic acid is the recited percent free from other macromolecules, or contaminants that may be present during the production of the PAMmer and/or a guide nucleic acid and/or a Cas9 polypeptide.

### Kits

[0487] The present disclosure provides kits for carrying out a subject method. A subject kit can include one or more of: a Cas9 polypeptide; a nucleic acid comprising a nucleotide encoding a Cas9 polypeptide; a PAMmer; a nucleic acid comprising a nucleotide sequence encoding a PAMmer; a guide nucleic acid; a nucleic acid comprising a nucleotide sequence encoding a guide nucleic acid; an activator; a nucleic acid comprising a nucleotide sequence encoding an activator; a targeter; and a nucleic acid comprising a nucleotide sequence encoding a targeter; all of which are described in detail above.

[0488] A kit may comprise a complex that comprises two or more of: a Cas9 polypeptide; a nucleic acid comprising a nucleotide encoding a Cas9 polypeptide; a PAMmer; a nucleic acid comprising a nucleotide sequence encoding a PAMmer; a guide nucleic acid; a nucleic acid comprising a nucleotide sequence encoding a guide nucleic acid; an activator; a nucleic acid comprising a nucleotide sequence encoding an activator; a targeter; and a nucleic acid comprising a nucleotide sequence encoding a targeter.

[0489] The present disclosure provides a kit for carrying out a subject method. A subject kit comprises: a subject PAMmer, or a nucleic acid comprising a nucleotide sequence encoding the PAMmer;

[0490] and a subject guide nucleic acid, or a nucleic acid comprising a nucleotide sequence encoding the guide nucleic acid. In some cases, the nucleic acid comprising a nucleotide sequence encoding the guide nucleic acid further comprises a nucleotide sequence encoding a Cas9 polypeptide (e.g. a wild type Cas9 polypeptide, a variant Cas9 polypeptide that exhibits reduced nuclease activity relative to wild-type Cas9; a chimeric Cas9 polypeptide, and the like).

[0491] In some embodiments of any of the above kits, the kit comprises an activator or a targeter. In some embodiments of any of the above kits, the kit comprises a single guide nucleic acid. In some embodiments of any of the above kits, the kit comprises a PAMmer. In some embodiments of any of the above kits, the kit comprises two or more guide nucleic acids (e.g, dual and/or single guide nucleic acids). In some embodiments of any of the above kits, the kit comprises two or more PAMmers. In some embodiments of any of the above kits, a guide nucleic acid (e.g., including two or more guide nucleic acids) and/or a PAMmer can be provided as an array (e.g., an array of RNA molecules, an array of DNA molecules, e.g., encoding the guide nucleic acid(s) and/or PAMmers, etc.). Such kits can be useful, for example, for use in conjunction with the above described genetically modified host cells that comprise a subject Cas9 polypeptide. In some embodiments of any of the above kits, the kit further comprises a donor polynucleotide to effect the desired genetic modification. Components of a subject kit can be in separate containers; or can be combined in a single container.

[0492] Any of the above-described kits can further include one or more additional reagents, where such additional reagents can be selected from: a dilution buffer; a reconstitution solution; a wash buffer; a control reagent; a control expression vector or RNA polynucleotide; a reagent for in vitro production of the Cas9 polypeptide from DNA, and the like.

[0493] In some cases, a subject kit further comprises a variant Cas9 polypeptide that exhibits reduced nuclease activity relative to wild-type Cas9.

[0494] In some cases, a subject kit further comprises a nucleic acid comprising a nucleotide sequence encoding a variant Cas9 polypeptide that exhibits reduced nuclease activity relative to wild-type Cas9.

[0495] A subject kit can further include one or more additional reagents, where such additional reagents can be selected from: a buffer; a wash buffer; a control reagent; a control expression vector or RNA polynucleotide; a reagent for in vitro production of a Cas9 polypeptide from DNA; and the like. In some cases, a Cas9 polypeptide included in a subject kit is a wild type Cas9 polypeptide. In some cases, a Cas9 polypeptide included in a subject kit is a variant Cas9 polypeptide. In some cases, a Cas9 polypeptide included in a subject kit is a fusion variant Cas9 polypeptide.

[0496] Components of a subject kit can be in separate containers; or can be combined in a single container.

[0497] In addition to above-mentioned components, a subject kit can further include instructions for using the components of the kit to practice the subject methods. The instructions for practicing the subject methods are generally recorded on a suitable recording medium. For example, the instructions may be printed on a substrate, such as paper or plastic, etc. As such, the instructions may be present in the kits as a package insert, in the labeling of the container of the kit or components thereof (i.e., associated with the packaging or subpackaging) etc. In other embodiments, the instructions are present as an electronic storage data file present on a suitable computer readable storage medium, e.g. CD-ROM, diskette, flash drive, etc. In yet other embodiments, the actual instructions are not present in the kit, but means for obtaining the instructions from a remote source, e.g. via the internet, are provided. An example of this embodiment is a kit that includes a web address where the instructions can be viewed and/or from which the instructions can be downloaded. As with the instructions, this means for obtaining the instructions is recorded on a suitable substrate.

### Libraries

[0498] The present disclosure provides a library of two or more PAMmers. The present disclosure provides a library of two or more targeting pairs, where a targeting pair is a guide nucleic acid and a cognate PAMmer. Thus, each targeting pair is associate wth (targets) one target site of a single stranded target nucleic acid. The guide nucleic acids and/or PAMmers can be present in the library as nucleic acids (e.g., recombinant expression vectors) comprising nucleotides encoding guide nucleic acids and/or PAMmers.

[0499] A subject library can comprise from about 2 targeting pairs to about 10¹² targeting pairs; e.g., a subject library can comprise from about 2 targeting pairs to about 10² targeting pairs, from about 10² targeting pairs to about 10³ targeting pairs, from about 10³ targeting pairs to about 10⁵ targeting pairs, from about 10⁵ targeting pairs to about 10⁷ targeting pairs, from about 10⁷ targeting pairs to about 10⁹ targeting pairs, or from about 10⁹ targeting pairs to about 10¹² targeting pairs.

[0500] A “targeting pair” of a subject library differs from other members of the library in the nucleotide sequence of the targeting segment of the guide nucleic acid as well as the orientation segement and/or the specificity segment of the PAMmer. Thus, e.g., each targeting pair of a subject library can comprise a guide nucleic acid with the same or substantially the same nucleotide sequence of the protein-binding segment as all other members of the library. In this way, the library can comprise members that bind to different target nucleic acids.

### Utility

[0501] A method for cleaving and/or binding a single-stranded target nucleic acid according to the present disclosure finds use in a variety of applications, which are also provided. Applications include research applications; diagnostic applications; industrial applications; and treatment applications. Applications include, e.g., determining the effect (e.g., in a target cell) of reducing the presence of a target nucleic acid (e.g., mRNA, tRNA, rRNA, microRNA, ncRNA, lncRNA, etc.) (i.e., target-selected and target-specific RNA degradation); and/or treating an individual by degrading a particular targeted single stranded DNA or single stranded RNA.

[0502] As described above, applications also include (e.g., when using a binding method to visualize a target nucleic acid) the visualization and subcellular localization of specific single stranded target nucleic acids (e.g., in real time) (e.g., multi-color RNA imaging inside of a cell). Also as described above, applications include (e.g., when using a binding method to collect and/or analyze single stranded target nucleic acid) RNA-protein pulldown assays from living cells (e.g., in vitro, ex vivo, and/or in vivo). As described above, applications include (e.g, when a binding method is used to isolate and/or collect and/or analyze target nucleic acid) the identification of target nucleic acid-associated proteins (e.g., via mass spectrometry analysis), or even purification of intact target RNA:protein complexes and subsequent biochemical or biophysical studies.

[0503] A subject cleaving method can be used for drug discovery and target validation. High through-put genomic analysis can be carried out using a subject cleaving method, in which only the targeting segment of the guide nucleic acid and the orientation segment of the PAMmer needs to be varied, while the protein-binding segment of the guide nucleic acid (in some cases) can be held constant. A library (e.g., a subject library) comprising a plurality of nucleic acids used in the genomic analysis can include, for example: a promoter operably linked to a guide nucleic acid-encoding nucleotide sequence, where each nucleic acid can include a different targeting segment, and a common protein-binding segment. Applications include large-scale phenotyping and gene-to-function mapping.

### EXAMPLES

[0504] The following examples are put forth so as to provide those of ordinary skill in the art with a complete disclosure and description of how to make and use the present invention, and are not intended to limit the scope of what the inventors regard as their invention nor are they intended to represent that the experiments below are all or the only experiments performed. Efforts have been made to ensure accuracy with respect to numbers used (e.g. amounts, temperature, etc.) but some experimental errors and deviations should be accounted for. Unless indicated otherwise, parts are parts by weight, molecular weight is weight average molecular weight, temperature is in degrees Celsius, and pressure is at or near atmospheric. Standard abbreviations may be used, e.g., bp, base pair(s); kb, kilobase(s); pl, picoliter(s); s or sec, second(s); min, minute(s); h or hr, hour(s); aa, amino acid(s); kb, kilobase(s); bp, base pair(s); nt, nucleotide(s); i.m., intramuscular(ly); i.p., intraperitoneal(ly); s.c., subcutaneous(ly); and the like.

[0505] In FIGS. 1-6 of the following working examples, a subject PAMmer is schematized above or below the appropriate experimental lanes and the PAM sequence is boxed (also refer to FIGS. 8A-D).

### Example 1

### Use of Cas9 to Cleave a Single Stranded RNA (sRNA)

[0506] The working examples demonstrate that a Cas9 polypeptide associated with a guide nucleic acid can bind and cleave single stranded RNA (sRNA) target sequences. Single stranded target nucleic binding is stabilized by including a short PAM-containing oligonucleotide (‘PAMmer’) that hybridizes to the single stranded target nucleic acid (e.g, RNA and/or DNA) downstream of the region that is recognized sequence-specifically through base-pairing with the guide nucleic acid. Inclusion of the PAMmer also activates Cas9 to cleave the singled stranded target nucleic acid using the same HNH nuclease domain that cleaves double stranded target nucleic acid (dsDNA).

[0507] The working examples demonstrate that Cas9 complexed with guide nucleic acid binds target RNA and that PAMmers increase the affinity of this interaction (FIG. 1); that longer PAMmers lead to higher affinity binding, and that the 5′-NGG-3′ PAM itself does not need to base-pair with target nucleic acid for this effect (FIG. 2); that PAMmers activate Cas9 complexed with guide nucleic acid to cleave target RNA (FIG. 3); that this activating effect is dependent on the PAM sequence, and is not recovered with just flanking RNA:DNA duplex (FIG. 4).

[0508] The working examples demonstrate that Cas9 can be used to target single stranded nucleic acids. This is useful for multiple applications, including (but not limited to) in vivo RNA imaging/localization, RNA-protein analysis through the affinity purification of specific RNA molecules via Cas9, and programmable cleavage/degradation of target RNAs in vitro or in vivo.

[0509] FIG. 1. Specific single-stranded RNA binding by Cas9 is the absence or presence of a PAM-containing DNA oligonucleotide (‘PAMmer’). Binding assays were performed with S. pyogenes Cas9 (complexed with a guide nucleic acid) in the presence of ˜1 nM 5′-³²P-labeled double-stranded DNA, single-stranded RNA or single-stranded RNA in the presence of a DNA oligonucleotide containing a TGG PAM, GG PAM, or no PAM at its 5′ end. Cas9 was held constant at 300 nM and the guide nucleic acid was titrated from 0.3 nM to 300 nM. Reactions were resolved on a 5% native polyacrylamide gel containing 5 mM MgCl₂ and visualized using a phoshorimager.

[0510] FIG. 2. Specific single-stranded RNA binding by Cas9 is the absence or presence of PAMmers of variable length. (A-B) Binding assays were performed with S. pyogenes Cas9 (complexed with a guide nucleic acid) in the presence of ˜1 nM 5′-³²P-labeled single-stranded RNA or single-stranded RNA in the presence of PAMmers containing increasing lengths downstream of the TGG sequence. These experiments demonstrate that longer PAMmers lead to higher affinity binding, likely as a consequence of increased stability of the PAMmer:ssRNA hybrid duplex. The PAM itself does not need to base-pair with target RNA for high-affinity binding by Cas9:RNA (bottom gel, right side). Cas9 was held constant at 300 nM and the guide nucleic acid was titrated from 0.01 nM to 300 nM. Reactions were resolved on a 5% native polyacrylamide gel containing 5 mM MgCl₂ and visualized using a phoshorimager. The PAM sequence itself within the PAMmer need not be base-paired to the target nucleic acid. Thus, this strategy can be used to target non PAM-containing sites within a target nucleic acid.

[0511] FIG. 3. Specific single-stranded RNA cleavage by Cas9 is activated by the addition of a PAMmer having a PAM sequence. Cleavage assays were performed with 100 nM S. pyogenes Cas9 (complexed with a guide nucleic acid) in the presence of ˜1 nM 5′-³²P-labeled double-stranded DNA, single-stranded RNA or single-stranded RNA pre-annealed with a DNA oligonucleotide containing a TGG PAM sequence. Time points were taken at 0, 1, 5, 60 and 120 min and immediately quenched with formamide-EDTA buffer. Quenched samples were resolved on a 12% urea-polyacrylamide gel electrophoresis (PAGE) gel and visualized using a phosphorimager.

[0512] FIG. 4. Specific single-stranded RNA cleavage by Cas9 is activated by the addition of a PAMmer having a PAM sequence, but not by a PAMmer without a PAM sequence. (A-B) Cleavage assays were performed with 100 nM S. pyogenes Cas9 (complexed with a guide nucleic acid) in the presence of ˜1 nM 5′-³²P-labeled double-stranded DNA, single-stranded RNA or single-stranded RNA pre-annealed with various DNA oligonucleotides. Time points were taken at 0, 1, 2, 5, 10, 30 and 60 min and immediately quenched with formamide-EDTA buffer. Quenched samples were resolved on a 12% urea-PAGE gel and visualized using a phoshoimager. A ssDNA target nucleic acid was not cleaved when an RNA PAMmer was used. However, ssRNA and ssDNA target nucleic acids were both cleaved when a DNA PAMmer was used (also see FIG. 6).

[0513] FIG. 5. (A) Cas9 programmed with guide RNA was incubated with four different target ssRNA sequences; each reaction contained a 100-fold excess of complementary PAMmer (without a specificity segment) specific to each target ssRNA. Cas9 binds each of the targets with similar affinity, despite the fact that the guide RNA is complementary only to the λ2 target. These data indicate that, under these conditions, the affinity of Cas9 for these targets is dominated by presentation of the PAMmer, and not by sequence complementarity between the guide RNA and target RNA. Thus, when the PAMmer does not have a specificity segment (i.e., the PAMmer has a PAM sequence and an orientation segment), the binding of a Cas9 polypeptide:guide nucleic acid complex does not require complementarity between the targeting segment of the guide nucleic acid and the target nucleic acid. (B) The experiment from FIG. 5A was repeated, except that the PAMmers each contained a specificity segment at the 5′ end (the specificity segment was positioned 5′ of the PAM sequence, as depicted). The target nucleic acids were 55 nucleotide (nt) ssRNA and the PAMmers were each 55 nt (with a 20 nt specificity segment) DNA, such that an RNA:DNA duplex was formed. When Cas9 was complexed with a λ2 guide RNA (i.e., the specificity segment of the guide RNA was complementary to the λ2 target ssRNA, but not the λ3 or λ4 targets). Only the λ2 target could be melted open and recognized, presumably via base pairing between guide RNA and target RNA, while the off-targets (λ3 and λ4) were unbound. These experiments demonstrate that when the PAMmer includes a specificity segment, increased specificity for the target nucleic acid can be achieved. Not to be bound by theory, this is presumably because the target duplex (PAMmer bound to the target single stranded nucleic acid) must be unwound before initiating base-pairing to the target ssRNA. Thus, in some instances when the PAMmer has a specificity segment, the binding of a Cas9 polypeptide:guide nucleic acid complex to a single stranded target nucleic acid requires complementarity between the targeting segment of the guide nucleic acid and the target nucleic acid. (C) Cleavage assays were performed with 100 nM S. pyogenes Cas9 (complexed with a guide nucleic acid) in the presence of ˜1 nM 5′-³²P-labeled double-stranded DNA, single-stranded RNA or single-stranded RNA pre-annealed with a PAMmer (a DNA oligonucleotide containing a TGG PAM sequence (as depicted)). Time points were taken at 0, 5, 10, 30, and 60 minutes, at 37° C. and immediately quenched with formamide-EDTA buffer. Quenched samples were resolved on a 12% urea-PAGE gel and visualized using a phosphorimager. These data show that when the PAMmer does not have a specificity segment (i.e., the PAMmer has a PAM sequence and an orientation segment), the cleavage of a single stranded target nucleic acid by a Cas9 polypeptide does require complementarity between the targeting segment of the guide nucleic acid and the target nucleic acid (although binding does not have this requirement, see FIG. 5A).

[0514] FIG. 6. Cas9 can be activated by a PAM-containing oligonucleotide in which the TGG PAM sequence is mismatched with the target RNA. Cleavage assays were performed with 100 nM S. pyogenes Cas9 (complexed with a guide nucleic acid) in the presence of ˜1 nM 5′-³²P-labeled single-stranded RNA, single-stranded RNA pre-annealed with various DNA oligonucleotides, or single-stranded RNA. Time points were taken at 0, 5, 10, 30 and 60 min and immediately quenched with formamide-EDTA buffer. Quenched samples were resolved on a 12% urea-PAGE gel and visualized using a phoshoimager. The results show that the PAM sequence in the PAMmer need not base-pair with the single stranded target nucleic acid (sRNA in this case) for nuclease activation, indicating that non-PAM containing nucleic acid sequences can be targeted.

### Example 2

### Use of Cas9 to Cleave and/or Bind a Single Stranded DNA (ssDNA)

[0515] Materials and Methods

[0516] Wild-type Cas9 from S. pyogenes was purified. crRNAs (42 nucleotides in length) were either ordered synthetically (Integrated DNA Technologies) or transcribed in vitro with T7 polymerase using single-stranded DNA templates. tracrRNA was also transcribed in vitro and contained nucleotides 15-87 following the numbering scheme used previously. crRNA:tracrRNA duplexes were prepared by mixing equimolar concentrations of each RNA in Hybridization Buffer (20 mM Tris-HCl pH 7.5, 100 mM KCl, 5 mM MgCl₂), heating to 95° C. for 30 seconds, and slow-cooling. The substrates were prepared by 5′-radiolabeling only the target strand, hybridizing it to a 10× excess of the indicated unlabeled complementary strand, and gel purifying the partial/full duplex by 10% native gel electrophoresis. Cas9:RNA complexes were reconstituted prior to cleavage and binding experiments by incubating Cas9 and the crRNA:tracrRNA duplex for 10 min at 37° C. in Reaction Buffer. Cleavage assays were conducted in reaction buffer at room temperature and analyzed by 10% denaturing polyacrylamide gel electrophoresis and phosphorimaging. Aliquots were removed at each time point and quenched by the addition of gel loading buffer supplemented with 25 mM EDTA (at 1×). Reactions contained ˜1 nM radiolabeled DNA substrate and 100 nM Cas9:RNA

[0517] Results

[0518] In the absence of a PAMmer, a ssDNA substrate was cleaved more than two orders of magnitude slower than a double-stranded DNA (dsDNA) substrate (FIG. 7A and FIG. 7B), despite the fact that dCas9:RNA (dCas9 complexed with a guide nucleic acid) bound both the dsDNA and ssDNA substrates with similar affinities (FIG. 7b).

[0519] Substrates were prepared with varying lengths of dsDNA at the 3′ flanking sequence (FIG. 7a). Cleavage assays revealed that the ssDNA target strand could be activated for cleavage in the presence of flanking dsDNA that extended across the PAM sequence (i.e., the presence of a PAMmer), but that this activating effect was lost when the dsDNA was truncated immediately before the PAM sequence (FIG. 7A and FIG. 7B). Binding experiments confirmed these results were not a consequence of discrimination at the level of binding (FIG. 7b). Rather, the presence of the 5′-NGG-3′ PAM on the non-target strand was critical for a step of the reaction that occurred after binding. Quantification of cleavage assays can be seen in FIG. 7c. For binding experiments (quantified in FIG. 7D), substrates were gel purified after annealing the radiolabelled target strand to a 10× excess of cold complement. Binding reactions contained ˜0.1 nM DNA and increasing concentrations of dCas9-RNA, and were incubated at 37° C. for 1 h before being resolved by 5% native PAGE. The quantified data were fit with standard binding isotherms (solid lines). Results from three independent experiments yielded apparent Kd values of 0.27±0.14 nM (substrate 1), 0.28±0.12 nM (substrate 2), 0.59±0.18 nM (substrate 3) and 0.21±0.06 nM (substrate 4).

### Example 3

### Variant Cas9 Polypeptides with Reduced Nuclease Activity

### Materials and Methods

### PAM Recognition by SpyCas9 Involves Two Tryptophan-Containing Flexible Loops

[0520] To gain insight into PAM sequence binding by S. pyogenes Cas9 (“SpyCas9”), the SpyCas9 RuvC nuclease domain structure was compared to that of the RuvC Holliday junction resolvase-substrate complex (PDB entry 4LD0). RuvC structures were then superpositioned to model the likely trajectory of the non-target DNA strand in the SpyCas9 holoenzyme. The DNA strand is located along the length of the nuclease lobe cleft in an orientation that would position the 3′ end of the DNA, and hence the PAM, at the junction of the two lobes, in the vicinity of the Arg-rich segment and the Topo-homology domain.

[0521] To directly identify regions of Cas9 involved in PAM binding, catalytically inactive SpyCas9 (D10A/H840A), along with a crRNA:tracrRNA guide RNA, was bound to DNA targets carrying a photoactivatable 5-bromodeoxyuridine (Br-dU) nucleotide adjacent to either end of the GG PAM motif on the non-target strand (FIG. 16A). Following UV irradiation and trypsin digestion, covalent peptide-DNA crosslinks were detected (FIG. 16A), whereas a DNA substrate containing Br-dU on the target strand opposite the PAM failed to produce a crosslink After treatment with nuclease and phosphatase to digest cross-linked DNA, nano-HPLC MS/MS was performed to identify tryptic peptides containing an extra mass resulting from covalent dU or p-dU adducts (FIG. 16A). The nucleotide immediately 5′ to the GG motif cross-linked to residue W476^{Spy}, whereas the residue immediately 3′ to the motif cross-linked to residue W1126^{Spy}. Both tryptophans are located in disordered regions of the SpyCas9 structure that are ˜30 Å apart. W476^{Spy} resides in a 53-aa loop at the edge of the alpha helical lobe underneath the Arg-rich region, whereas W1126^{Spy} is in a 33-aa loop that connects the RuvC domain and the Topo-homology domain. These tryptophan residues are conserved among Type II-A Cas9 proteins that utilize the same NGG PAM to cleave target DNA in vitro, but are absent from the Neisseria meningitidis and Streptococcus thermophilus Type II-C Cas9 proteins, which are known to recognize different PAMs (FIG. 16C, FIG. 16D).

[0522] To test the roles of both loops in DNA target recognition and cleavage, triple alanine substitutions of residues 475^{Spy}-477^{Spy} (P-W-N) and 1125^{Spy}-1127^{Spy} (D-W-D) (of S. Pyogenes Cas9) were made and cleavage assays were performed with double-stranded DNA targets (FIG. 16B). SpyCas9 mutated in residues 1125^{Spy}-1127^{Spy} showed wild-type cleavage activity, whereas mutations in residues 475^{Spy}-477^{Spy} caused a subtle but reproducible decrease of activity compared to wild-type. Remarkably, mutating both loops simultaneously almost completely abolished SpyCas9 activity under the conditions tested (FIG. 16D). These data demonstrate that at least one tryptophan is necessary to promote the DNA cleavage reaction. The spatial constraints of crosslink formation and the distance of both tryptophan residues from either nuclease domain argue against a direct catalytic role of these residues, and instead suggest that they are involved in PAM binding.

[0523] FIG. 16. Crosslinking data identify a PAM binding region adjacent to the active-site cleft. (A) Cartoon (left) showing the design and workflow of crosslinking experiments with DNA substrates containing 5-bromodeoxyuridine (Br-dU) nucleotides for LC-MS/MS analysis. The guide/target sequence is depicted in red and the PAM is highlighted in yellow. The denaturing polyacrylamide gel (right) demonstrates the generation of covalent peptide-DNA adducts with Br-dU1 and catalytically inactive SpyCas9 (dCas9) following UV irradiation and trypsin digestion. (B) DNA cleavage activity assays with SpyCas9 constructs containing mutations in residues identified by crosslinking and LC-MS/MS experiments. (C) Multiple sequence alignments of selected portions of Cas9 proteins associated with Type II-A CRISPR loci. Primary sequences of Cas9 proteins from Streptococcus pyogenes (GI 15675041), Streptococcus thermophilus LMD-9 (GI 116628213), Listeria innocua Clip 11262 (GI 16801805), Streptococcus agalactiae A909 (GI 76788458), Streptococcus mutans UA159 (GI 24379809), and Enterococcus faecium 1,231,408 (GI 257893735) were aligned using MAFFT. The alignment was generated in ESPript using default settings. Triangles indicate the tryptophan residues involved in PAM binding based on SpyCas9 crosslinking assay. (D) Multiple sequence alignment of selected portions of Type II-A and II-C Cas9 orthologs. The primary sequences of Cas9 orthologs were aligned using CLUSTALW. The alignment was generated in ESPript using default settings. Triangles indicate the tryptophan residues involved in PAM binding based on SpyCas9 crosslinking assay. Accession numbers for each Cas9 ortholog are as follows: Ana (Actinomyces naeslundii str. Howell 279, EJN84392.1), Nme (Neisseria meningitidis, WP_019742773.1), Cje (Campylobacter jejuni, WP_002876341.1), Tde (Treponema denticola, WP_002676671.1), Sth (Streptococcus thermophilus LMD-9, YP_820832.1), Smu (Streptococcus mutans, WP_019803776.1), Sag (Streptococcus agalactiae, WP_001040088.1), and Spy (Streptococcus pyogenes, YP_282132.1).

### Example 4

### Use of PAMmers Having One or More Modified Nucleotides

[0524] Experiments were carried out as described above for binding and cleaving, and further details are provided in FIG. 17. The data show that PAMmers having modified nucleotides can be successfully used in the subject methods, as assayed by both binding assays (FIG. 17A) and cleavage assays (FIG. 17B). The target nucleic acid is a single stranded RNA. For both FIG. 17A and FIG. 17B, the number associated with each panel (lower left in FIG. 17A; above and to the right in FIG. 17B) refers to the PAMmer that was used (see key below). Note: the gel in FIG. 17B has “smiling”, but “uncleaved” and “cleaved” substrates are clearly labeled as such.

[0525] Legend for FIG. 17A and FIG. 17B

(1) ssDNA PAMmer:
(SEQ ID NO: 1466)
TGGGCTGTCAAAATTGAGC;
(2) 2′OMe/ssDNA PAMmer:
(SEQ ID NO: 1545)
mGmGmGmCmUmGmUmCmAmAAATTGAGC,
where mN is 2′OMe modified nucleotide N;
(3) 2′OMe/ssDNA PAMmer:
(SEQ ID NO: 1514)
mUGGGCTGTCAAAATTGAGmC,
where mN is 2′OMe modified nucleotide N;
(4) phosphorothioate ssDNA PAMmer:
(SEQ ID NO: 1546)
G*G*G*C*T*G*T*C*A*AAATTGAGC,
where * is a phosphorothioate linkage;
(5) phosphorothioate ssDNA PAMmer:
(SEQ ID NO: 1547)
T*GGGCTGTCAAAATTGAG*C,
where * is a phosphorothioate linkage;
(6) 2′F/ssDNA PAMmer:
(SEQ ID NO: 1548)
fGfGfGfCfTfGfTfCfAfAAATTGAGC,
where fN is a 2′F modified nucleotide N;
(7) LNA/ssDNA PAMmer:
(SEQ ID NO: 1549)
+G+G+GCTG+T+C+AAAATTGAGC,
where +N is a LNA nucleotide N;
(8) 2′F/ssDNA PAMmer:
(SEQ ID NO: 1550)
fUGGGCTGTCAAAATTGAGfC,
where fN is a 2′F modified nucleotide N;
and
(9) LNA/ssDNA PAMmer:
(SEQ ID NO: 1551)
+TGGGCTGTCAAAATTGAG+C,
where +N is a LNA nucleotide N.

### Example 5

### Programmable RNA Recognition and Cleavage by CRISPR/Cas9

[0526] The CRISPR-associated protein Cas9 is anRNA-guidedDNAendonuclease that uses RNA-DNA complementarity to identify target sites for sequence-specific double-stranded DNA (dsDNA) cleavage. In its native context, Cas9 acts on DNA substrates exclusively because both binding and catalysis require recognition of a shortDNAsequence, known as the protospacer adjacent motif (PAM), next to and on the strand opposite the twenty-nucleotide target site in dsDNA. Cas9 has proven to be a versatile tool for genome engineering and gene regulation in a large range of prokaryotic and eukaryotic cell types, and in whole organisms, but it has been thought to be incapable of targeting RNA5. The experiments herein demonstrate that Cas9 binds with high affinity to single-stranded RNA (ssRNA) targets matching the Cas9-associated guide RNA sequence when the PAM is presented in trans as a separate DNA oligonucleotide. Furthermore, PAM-presenting oligonucleotides (PAMmers) stimulate site-specific endonucleolytic cleavage of ssRNA targets, similar to PAM-mediated stimulation of Cas9-catalysed DNA cleavage. Using PAMmers, Cas9 can be specifically directed to bind or cut RNA targets while avoiding corresponding DNA sequences. This strategy enables the isolation of a specific endogenous messenger RNA from cells. These results reveal a fundamental connection between PAM binding and substrate selection by Cas9, and highlight the utility of Cas9 for programmable transcript recognition without the need for tags.

[0527] CRISPR-Cas immune systems must discriminate between self and nonself to avoid an autoimmune response. In type I and II systems, foreign DNA targets that contain adjacent PAM sequences are targeted for degradation, whereas potential targets in CRISPR loci of the host do not contain PAMs and are avoided by RNA-guided interference complexes. Single-molecule and bulk biochemical experiments showed that PAMs act both to recruit Cas9-guide-RNA (Cas9-gRNA) complexes to potential target sites and to trigger nuclease domain activation. Cas9 from Streptococcus pyogenes recognizes a 5′-NGG-3′ PAM on the non-target (displaced) DNA strand, suggesting that PAM recognition may stimulate catalysis through allosteric regulation. Based on the observations that single-stranded DNA (ssDNA) targets can be activated for cleavage by a separate PAMmer, a similar strategy was contemplated for enabling Cas9 to cleave ssRNA targets in a programmable fashion (FIG. 18a). Using S. pyogenes Cas9 and dual-guideRNAs (Methods), in vitro cleavage experiments were performed using a panel of RNA and DNA targets (FIG. 18b and Table 2). Deoxyribonucleotide PAMmers specifically activated Cas9 to cleave ssRNA (FIG. 18c), an effect that required a 5′-NGG-3′ or 5′-GG-3′ PAM. RNA cleavage was not observed using ribonucleotide-based PAMmers, suggesting that Cas9 may recognize the local helical geometry and/or deoxyribose moieties within the PAM. Consistent with this hypothesis, dsRNA targets were not cleavable and RNA-DNA heteroduplexes could only be cleaved when the non-target strand was composed of deoxyribonucleotides. Notably, Cas9 cleaved the ssRNA target strand between positions 4 and 5 of the base-paired gRNA-target-RNA hybrid (FIG. 18d), in contrast to the cleavage between positions 3 and 4 observed for dsDNA. This is probably due to subtle differences in substrate positioning. However, a significant reduction in the pseudo-first-order cleavage rate constant of PAMmer-activated ssRNA as compared to ssDNA was not observed (FIG. 22).

[0528] FIG. 18 demonstrates RNA-guided Cas9 cleaving ssRNA targets in the presence of a short PAM presenting DNA oligonucleotide (PAMmer). A, Schematic depicting the approach used to target ssRNA for programmable, sequence-specific cleavage. B, The panel of nucleic acid substrates examined in this study. Substrate elements are coloured as follows:DNA, grey; RNA, black; guide-RNA target sequence, red; DNA PAM, yellow; mutated DNA PAM, blue; RNA PAM, orange. The 18-nucleotide ‘GG PAMmer’ contains only a GG dinucleotide PAM sequence. nt, nucleotide. C, Representative cleavage assay for 5′-radiolabelled nucleic acid substrates using Cas9-gRNA, numbered as in b. D, Cas9-gRNA cleavage site mapping assay for substrate 3. T1 and OH2 denote RNase T1 and hydrolysis ladders, respectively; the sequence of the target ssRNA is shown at right. Sites of G cleavage by RNase T1 are shown at left. Site of Cas9 cleavage (G24) shown at right. E, Representative ssRNA cleavage assay in the presence of PAMmers of increasing length, numbered as in B.

[0529] FIG. 22 depicts quantified data for cleavage of ssRNA by Cas9-gRNA in the presence of a 19-nucleotide PAMmer. Cleavage assays were conducted as described in the Methods, and the quantified data were fitted with single-exponential decays. Results from four independent experiments yielded an average apparent pseudo-first-order cleavage rate constant (mean±s.d.) of 0.032±0.007 min⁻¹. This is slower than the rate constant determined previously for ssDNA in the presence of the same 19-nucleotide PAMmer (7.3±3.2 min⁻¹).

[0530] By varying PAMmer length, it was next tested whether PAMmer nuclease activation depends on the stability of the hybridized PAMmer-ssRNA duplex. ssRNA cleavage was lost when the predicted melting temperature for the duplex decreased below the temperature used in the experiments (FIG. 18e). In addition, large molar excesses of di- or tri-deoxyribonucleotides in solution were poor activators of Cas9 cleavage (FIG. 23). Collectively, these data demonstrate that hybrid substrate structures composed of ssRNA and deoxyribonucleotide-based PAMmers that anneal upstream of the RNA target sequence can be cleaved efficiently by RNA-guided Cas9.

[0531] FIG. 23 demonstrates that RNA cleavage is marginally stimulated by di- and tri-deoxyribonucleotides. Cleavage reactions contained ˜1 nM 5′-radiolabelled target ssRNA and no PAMmer (left), 100 nM 18-nt PAMmer (second from left), or 1 mM of the indicated di- or tri-nucleotide (remaining lanes). Reaction products were resolved by 12% denaturing polyacrylamide gel electrophoresis (PAGE) and visualized by phosphorimaging.

[0532] The binding affinity of catalytically inactive dCas9 (Cas9 (D10A; H840A))-gRNA for ssRNA targets with and without PAMmers was then tested using a gel mobility shift assay. Notably, whereas the previous results showed that ssDNA and PAMmer-activated ssDNA targets are bound with indistinguishable affinity, PAMmer-activated ssRNA targets were bound >500-fold tighter than ssRNA alone (FIG. 19a, b). A recent crystal structure of Cas9 bound to a ssDNA target revealed deoxyribose-specific van der Waals interactions between the protein and the DNA backbone, suggesting that energetic penalties associated with ssRNA binding must be attenuated by favourable compensatory binding interactions with the provided PAM. The equilibrium dissociation constant measured for a PAMmer-ssRNA substrate was within five fold of that for dsDNA (FIG. 19b), and this high-affinity interaction again required a cognate deoxyribonucleotide 5′-GG-3′ PAM (FIG. 19a). Tight binding also scaled with PAMmer length (FIG. 19c), consistent with the cleavage data presented above.

[0533] FIG. 19 demonstrates that dCas9-gRNA binds ssRNA targets with high affinity in the presence of PAMmers. a, Representative electrophoretic mobility shift assay for binding reactions with dCas9-gRNA and a panel of 5′-radiolabelled nucleic acid substrates, numbered as in FIG. 18b. b, Quantified binding data for substrates 1-4 from a fitted with standard binding isotherms. Measured dissociation constants from three independent experiments (mean±s.d.) were 0.036±0.003 nM (substrate 1), >100 nM (substrate 2), 0.20±0.09 nM (substrate 3) and 0.18±0.07 nM (substrate 4). c, Relative binding data for 1 nM dCas9-gRNA and 5′-radiolabelled ssRNA with a panel of different PAMmers. The data are normalized to the amount of binding observed at 1 nM dCas9-gRNA with a 19-nucleotide (nt) PAMmer; error bars represent the standard deviation from three independent experiments.

[0534] It is known that Cas9 possesses an intrinsic affinity for RNA, but sequence specificity of the interaction had not been explored. Thus, to verify the programmable nature of PAMmer-mediated ssRNA cleavage by Cas9-gRNA, three distinct guideRNAs (λ2, λ3, and λ4; each targeting 20-nucleotide sequences within λ2, λ3, and λ4 RNAs, respectively) were prepared and their corresponding ssRNA targets were efficiently cleaved using complementary PAMmers without any detectable cross-reactivity (FIG. 20a). This result indicates that complementary RNA-RNA base pairing is critical in these reactions. Notably however, dCas9 programmed with the λ2 guide RNA bound all three PAMmer-ssRNA substrates with similar affinity (FIG. 20b). This observation suggests that high-affinity binding in this case may not require correct base pairing between the guide RNA and the ssRNA target, particularly given the compensatory role of the PAMmer.

[0535] FIG. 20 shows that 5′-extended PAMmers are required for specific target ssRNA binding. a, Cas9 programmed with either λ2-, λ3- or λ4-targeting gRNAs exhibits sequence-specific cleavage of 5′-radiolabelled λ2, λ3, and λ4 target ssRNAs, respectively, in the presence of cognate PAMmers. b, dCas9 programmed with a λ2-targeting gRNA exhibits similar binding affinity to λ2, λ3, and λ4 target ssRNAs in the presence of cognate PAMmers. Dissociation constants from three independent experiments (mean±s.d.) were 0.20±0.09 nM (λ2), 0.33±0.14 nM (λ3) and 0.53±0.21 nM (λ4). c, Schematic depicting the approach used to restore gRNA-mediated ssRNA binding specificity, which involves 5′-extensions to the PAMmer that cover part or all of the target sequence. d, dCas9 programmed with a λ2-targeting gRNA specifically binds the λ2 ssRNA but not λ3 and λ4 ssRNAs in the presence of complete 5′-extended PAMmers. Dissociation constants from three independent experiments (mean±s.d.) were 3.3±1.2 nM (λ2) and 0.100 nM (λ3 and λ4).

[0536] During dsDNA targeting by Cas9-gRNA, duplex melting proceeds directionally from the PAM and requires the formation of complementary RNA-DNA base pairs to offset the energetic costs associated with dsDNAunwinding. It was therefore tested whether binding specificity for ssRNA substrates would be recovered using PAMmers containing 5′-extensions that create a partially double-stranded target region requiring unwinding (FIG. 20c). Use of a 5′-extended PAMmer enabled dCas9 bearing the λ2 guide sequence to bind sequence selectively to the λ2 PAMmer-ssRNA target. The λ3 and λ4 PAMmer-ssRNA targets were not recognized (FIG. 20d and FIG. 24), although a tenfold reduction in overall ssRNAsubstrate binding affinity was observed. By systematically varying the length of the 5′ extension, it was found that PAMmers containing 2-8 additional nucleotides upstream of the 5′-NGG-3′ offer a good compromise between gains in binding specificity and concomitant losses in binding affinity and cleavage efficiency (FIG. 25).

[0537] FIG. 24 depicts a representative binding experiment demonstrating guide-specific ssRNA binding with 5′-extended PAMmers. Gel shift assays were conducted as described in the Methods section below. Binding reactions contained Cas9 programmed with λ2 gRNA and either λ2 (on-target), λ3 (off-target) or λ4 (off-target) ssRNAin the presence of short cognate PAMmers or cognate PAMmers with complete 5′-extensions, as indicated. The presence of a cognate 5′-extended PAMmer abrogated off-target binding. Three independent experiments were conducted to produce the data shown in FIG. 20b, d.

[0538] FIG. 25 depicts exploration of RNA cleavage efficiencies and binding specificity using PAMmers with variable 5′-extensions. a, Cleavage assays were conducted as described in the methods section below. Reactions contained Cas9 programmed with λ2 gRNA and λ2 ssRNA targets in the presence of PAMmers with 5′-extensions of variable length. The ssRNA cleavage efficiency decreased as the PAMmer extended further into the target region, as indicated by the fraction of RNA cleaved after 1 h. b, Binding assays were conducted as described in the Methods section below, using mostly the same panel of 5′-extended PAMmers as in a. Binding reactions contained Cas9 programmed with λ2 gRNA and either λ2 (on-target) or λ3 (off-target) ssRNA in the presence of cognate PAMmers with 5′-extensions of variable length. The binding specificity increased as the PAMmer extends further into the target region, as indicated by the fraction of λ3 (off-target) ssRNA bound at 3 nM Cas9-gRNA. PAMmers with 5′ extensions also caused a slight reduction in the relative binding affinity of λ2 (on-target) ssRNA.

[0539] It was next investigated whether nuclease activation by PAMmers requires base pairing between the 5′-NGG-3′ and corresponding nucleotides on the ssRNA. Prior studies have shown that DNA substrates containing a cognate PAM that is mismatched with the corresponding nucleotides on the target strand are cleaved as efficiently as a fully base-paired PAM. This could enable targeting of RNA while precluding binding or cleavage of corresponding genomic DNA sites lacking PAMs (FIG. 21a). To test this possibility, it was first demonstrated that Cas9-gRNA cleaves PAMmer-ssRNA substrates regardless of whether the PAM is base paired (FIG. 21b, c). When Cas9-RNA was incubated with both a PAMmer-ssRNA substrate and the corresponding dsDNA template containing a cognate PAM, both targets were cleaved. In contrast, when a dsDNA target lacking a PAM was incubated together with aPAMmer-ssRNA substrate bearing a mismatched 5′-NGG-3′ PAM, Cas9-gRNA selectively targeted the ssRNA for cleavage (FIG. 21c). The same result was obtained using a mismatched PAMmer with a 5′ extension (FIG. 21c), demonstrating that this general strategy enables the specific targeting of RNA transcripts while effectively eliminating any targeting of their corresponding dsDNA template loci.

[0540] It was next tested whether Cas9-mediated RNA targeting could be applied in tagless transcript isolation from HeLa cells (FIG. 21d). The immobilization of Cas9 on a solid-phase resin is described in the Methods section below (see also FIG. 26). As a proof of concept, GAPDH mRNA was first isolated from HeLa total RNA using biotinylated dCas9, gRNAs and PAMmers (Table 2) that target four non-PAM-adjacent sequences within exons 5-7 (FIG. 21e). A substantial enrichment of GAPDH mRNA relative to control b-actin mRNA was observed by northern blot analysis, but no enrichment using a non-targeting gRNA or dCas9 alone was observed (FIG. 21f).

[0541] FIG. 21 shows that RNA-guided Cas9 can target non-PAM sites on ssRNA and can be used to isolate GAPDH mRNA from HeLa cells in a tagless manner. a, Schematic of the approach designed to avoid cleavage of template DNA by targeting non-PAM sites in the ssRNA target. b, The panel of nucleic acid substrates tested in c. c, Cas9-gRNA cleaved ssRNA targets with equal efficiency when the 5′-NGG-3′ of the PAMmer was mismatched with the ssRNA. This strategy enables selective cleavage of ssRNAin the presence of non-PAM target dsDNA. d, Schematic of the dCas9 RNA pull-down experiment. e, GAPDH mRNA transcript isoform 3 (GAPDH-003) shown schematically, with exons common to all GAPDH protein-coding transcripts in red and gRNA/PAMmer targets G1-G4 indicated. kb, kilobase pairs. f, Northern blot showing that gRNAs and corresponding 5′-extended PAMmers enabled tagless isolation of GAPDH mRNA from HeLa total RNA; b-actin mRNA is shown as a control. g, Northern blot showing tagless isolation of GAPDH mRNA from HeLa cell lysate with varying 2′-OMe-modified PAMmers. RNase H cleavage is abrogated with v4 and v5 PAMmers; b-actin mRNA is shown as a control. u, unmodified PAMmer (G1). v1-v5, increasingly 2′-OMe-modified PAMmers (G1), see g for PAMmer sequences. h, Sequences of unmodified and modified GAPDH PAMmers used in g; 2′-OMe-modified nucleotides are shown in red.

[0542] FIG. 26 provides date related to site-specific biotin labelling of Cas9. a, In order to introduce a single biotin moiety on Cas9, the solvent accessible, non-conserved amino-terminal methionine was mutated to a cysteine (M1C; red text) and the naturally occurring cysteine residues were mutated to serine (C80S and C574S; bold text). This enabled cysteine-specific labelling with EZ-link Maleimide-PEG2-biotin through an irreversible reaction between the reduced sulphydryl group of the cysteine and the maleimide group present on the biotin label. Mutations of dCas9 are also indicated in the domain schematic. b, Mass spectrometry analysis of the Cas9 biotin-labelling reaction confirmed that successful biotin labelling only occured when the M1C mutation was present in the Cys-free background (C80S; C574S). The mass of the Maleimide-PEG2-biotin reagent is 525.6 Da. c, Streptavidin bead binding assay with biotinylated (biot.) or non-biotinylated (non-biot.) Cas9 and streptavidin agarose or streptavidin magnetic beads. Cas9 only remained specifically bound to the beads after biotin labelling. d, Cleavage assays were conducted as described in the Methods and resolved by denaturing PAGE. Reactions contained 100 nM Cas9 programmed with λ2 gRNA and ˜1 nM 5′-radiolabelled λ2 dsDNA target. e, Quantified cleavage data from triplicate experiments were fitted with single-exponential decays to calculate the apparent pseudo-first-order cleavage rate constants (average±standard deviation). Both Cys-free and biotin-labelled Cas9 (M1C) retained wild-type activity.

[0543] This approach was then used to isolate endogenous GAPDH transcripts from HeLa cell lysate under physiological conditions. In initial experiments, Cas9-gRNA captured two GAPDH-specific RNA fragments rather than the full-length mRNA (FIG. 21g). Based on the sizes of these bands, it was surmised that RNA-DNA heteroduplexes formed between the mRNA and PAMmer were cleaved by cellular RNaseH. Previous studies have shown that modified DNA oligonucleotides can abrogate RNaseH activity, and it was therefore investigated whether Cas9 would tolerate chemical modifications to the PAMmer. A wide range of modifications (locked nucleic acids, 2′-OMe and 2′-F ribose moieties) still enabled PAMmer-mediated nuclease activation (FIG. 27). Furthermore, by varying the pattern of 2′-OMe modifications in the PAMmer, RNase-H-mediated cleavage could be completely eliminated during the pull-down and intact GAPDH mRNA was successfully isolated (FIG. 21g, h). Notably, specific isolation of GAPDH mRNA in the absence of any PAMmer occurred, albeit with lower efficiency, suggesting that Cas9-gRNA can bind to GAPDH mRNA through direct RNA-RNA hybridization (FIG. 21f, g and FIG. 28). These experiments demonstrate that RNA guided Cas9 can be used to purify endogenous untagged RNA transcripts. In contrast to current oligonucleotide-mediated RNA-capture methods, this approach works well under physiological salt conditions and does not require crosslinking or large sets of biotinylated probes.

[0544] FIG. 27 depicts data showing that RNA-guided Cas9 can utilize chemically modified PAMmers. Nineteen-nucleotide PAMmer derivatives containing various chemical modifications on the 5′ and 3′ ends (capped) or interspersed throughout the strand still activated Cas9 for cleavage of ssRNA targets. These types of modification are often used to increase the in vivo half-life of short oligonucleotides by preventing exo- and endonuclease-mediated degradation. Cleavage assays were conducted as described in the Methods. PS, phosphorothioate bonds; LNA, locked nucleic acid.

[0545] FIG. 28 depicts data showing that Cas9 programmed with GAPDH-specific gRNAs can pull down GAPDH mRNA in the absence of PAMmers. a, Northern blot showing that, in some cases, Cas9-gRNA is able to pull down detectable amounts of GAPDH mRNA from total RNA without requiring a PAMmer. b, Northern blot showing that Cas9-gRNA G1 is also able to pull down quantitative amounts of GAPDH mRNA from HeLa cell lysate without requiring a PAMmer. s, standard; v1-5, increasingly 2′-OMe-modified PAMmers. See FIG. 21g for PAMmer sequences.

[0546] The data herein demonstrate the ability to re-direct the dsDNA targeting capability of CRISPR/Cas9 for RNA-guided ssRNA binding and/or cleavage (which can be referred to as RCas9, an RNA-targeting Cas9). Examples of uses for compositions and methods described herein include, but are not limited to those schematized in FIG. 29. Although certain engineered proteins such as PPR proteins and Pumilio/FBF (PUF) repeats show promise as platforms for sequence-specific RNA targeting, these strategies require re-designing the protein for every new RNA sequence of interest. In contrast to these systems, the molecular basis for RNA recognition by RCas9 is now clear and requires only the design and synthesis of a matching gRNA and complementary PAMmer. The ability to recognize endogenous RNAs within complex mixtures with high affinity and in a programmable manner allows for direct transcript detection, analysis and manipulation without the need for genetically encoded affinity tags.

[0547] FIG. 29 depicts schematics of example applications of RCas9 (RNA directed Cas9) for untagged transcript analysis, detection and manipulation. a, Catalytically active RCas9 can be used to target and cleave RNA targets, particularly those for which RNA-interference-mediated repression/degradation is not possible. b, Tethering the eukaryotic initiation factor eIF4G to a catalytically inactive dRCas9 targeted to the 5′ untranslated region of an mRNA can drive translation. c, dRCas9 tethered to beads can be used to specifically isolate RNA or native RNA-protein complexes of interest from cells for downstream analysis or assays including identification of bound-protein complexes, probing of RNA structure under native protein-bound conditions, and enrichment of rare transcripts for sequencing analysis. d, dRCas9 tethered to RNA deaminase or N6-mA methylase domains could direct site-specific A-to-I editing or methylation of RNA, respectively. e, dRCas9 fused to a U1 recruitment domain (arginine- and serine-rich (RS) domain) can be programmed to recognize a splicing enhancer site and thereby promote the inclusion of a targeted exon. f, dRCas9 tethered to a fluorescent protein such as GFP can be used to observe RNA localization and transport in living cells.

### Materials and Methods

### Cas9 and Nucleic Acid Preparation

[0548] Wild-typeCas9 and catalytically inactive dCas9 (Cas9(D10A; H840A)) from S. pyogenes were purified as previously described (Jinek et al., Science. 2012 Aug. 17; 337(6096):816-21). Forty two-nucleotide crRNAs were either ordered synthetically (IntegratedDNATechnologies) or transcribed in vitro with T7 polymerase using single-stranded DNA templates. Using the previously described numbering scheme (Jinek et al., Science. 2012 Aug. 17; 337(6096):816-21), tracrRNA was transcribed in vitro and contained nucleotides 15-87. Single-guide RNAs (sgRNAs) targeting 1-RNAs were transcribed in vitro from linearized plasmids and contain full-length crRNA and tracrRNA connected via a GAAA tetraloop insertion. GAPDH mRNA-targeting sgRNAs were transcribed in vitro from dsDNA PCR products. Target ssRNAs (55-56 nucleotides) were transcribed in vitro using single-stranded DNA templates. Sequences of all nucleic acid substrates used in this study can be found in Table 2.

[0549] All RNAs were purified using 10-15% denaturing polyacrylamide gel electrophoresis (PAGE). Duplexes of crRNA and tracrRNA were prepared by mixing equimolar concentrations of each RNAin hybridization buffer (20 mM Tris-HCl, pH7.5, 100 mM KCl, 5 mM MgCl₂), heating to 95° C. for 30 s and slow cooling. Fully double-stranded DNA/RNA substrates (substrates 1, 8-10 in FIG. 1 and substrates 1 and 2 in FIG. 4) were prepared by mixing equimolar concentrations of each nucleic acid strand in hybridization buffer, heating to 95° C. for 30 s, and slow cooling. RNA, DNA and chemically modified PAMmers were synthesized commercially (Intergrated DNA Technologies). DNA and RNA substrates were 5′-radiolabelled using [γ-³²P]ATP (PerkinElmer) and T4 polynucleotide kinase (New England Biolabs). Double-stranded DNA and dsRNA substrates (FIGS. 1c and 4c) were 5′-radiolabelled on both strands, whereas only the target ssRNA was 5′-radiolabelled in other experiments.

### Cleavage Assays

[0550] Cas9-gRNA complexes were reconstituted before cleavage experiments by incubating Cas9 and the crRNA-tracrRNA duplex for 10 min at 37° C. in reaction buffer (20 mM Tris-HCl, pH7.5, 75 mM KCl, 5 mM MgCl₂, 1 mM dithiothreitol (DTT), 5% glycerol). Cleavage reactions were conducted at 37° C. and contained 1 nM 5′-radiolabelled target substrate, 100 nM Cas9-RNA, and 100 nM PAMmer, where indicated. Aliquots were removed at each time point and quenched by the addition of RNA gel-loading buffer (95% deionized formamide, 0.025% (w/v) bromophenol blue, 0.025% (w/v) xylene cyanol, 50 mM EDTA (pH 8.0), 0.025% (w/v) SDS). Samples were boiled for 10 min at 95° C. before being resolved by 12% denaturing PAGE. Reaction products were visualized by phosphorimaging and quantified with ImageQuant (GE Healthcare).

### RNA Cleavage Site Mapping.

[0551] A hydrolysis ladder (OH2) was obtained by incubating, 25 nM 5′-radiolabelled λ2 target ssRNA in hydrolysis buffer (25 mM CAPS (N-cyclohexyl-3-aminopropanesulphonic acid), pH 10.0, 0.25 mM EDTA) at 95° C. for 10 min, before quenching on ice. An RNase T1 ladder was obtained by incubating, 25 nM 5′-radiolabelled λ2 target ssRNA with 1 U RNase T1 (New England Biolabs) for 5 min at 37° C. in RNase T1 buffer (20 mM sodium citrate, pH 5.0, 1 mM EDTA, 2 M urea, 0.1 mg/ml yeast transfer RNA). The reaction was quenched by phenol/chloroformextraction before addingRNA gel-loading buffer. All products were resolved by 15% denaturing PAGE.

### Electrophoretic Mobility Shift Assays.

[0552] In order to avoid dissociation of the Cas9-gRNA complex at low concentrations during target ssRNA binding experiments, binding reactions contained a constant excess of dCas9 (300 nM), increasing concentrations of sgRNA, and 0.1-1 nM of target ssRNA. The reaction buffer was supplemented with 10 mg/ml heparin in order to avoid non-specific association of apo-dCas9 with target substrates. Reactions were incubated at 37° C. for 45 min before being resolved by 8% native PAGE at 4° C. (0.53 TBE buffer with 5 mM MgCl₂). RNA and DNA were visualized by phosphorimaging, quantified with ImageQuant (GE Healthcare), and analyzed with Kaleidagraph (Synergy Software).

### Cas9 Biotin Labelling

[0553] To ensure specific labelling at a single residue on Cas9, two naturally occurring cysteine residues were mutated to serine (C80S and C574S) and a cysteine point mutant was introduced at residue Met 1. To attach the biotin moiety, 10 mM wild-type Cas9 or dCas9 was reacted with a 50-fold molar excess of EZ-LinkMaleimide-PEG2-Biotin (Thermo Scientific) at 25° C. for 2 h. The reaction was quenched by the addition of 10 mM DTT, and unreacted Maleimide-PEG2-Biotin was removed using a Bio-Gel P-6 column (Bio-Rad). Labelling was verified using a streptavidin bead binding assay, where 8.5 pmol of biotinylated Cas9 or non-biotinylated Cas9 was mixed with either 25 ml streptavidin-agarose (Pierce Avidin Agarose; Thermo Scientific) or 25 ml streptavidin magnetic beads (DynabeadsMyOne StreptavidinCl; Life Technologies). Samples were incubated in Cas9 reaction buffer at room temperature for 30 min, followed by three washes with Cas9 reaction buffer and elution in boiling SDS-PAGE loading buffer. Elutions were analyzed using SDS-PAGE. Cas9 M1C biotinylation was also confirmed using mass spectroscopy performed in the QB3/ChemistryMass Spectrometry Facility at UC Berkeley. Samples of intact Cas9 proteins were analyzed using an Agilent 1200 liquid chromatograph equipped with a Viva C8 (100 mm 31.0 mm, 5 mm particles, Restek) analytical column and connected in-line with an LTQOrbitrapXLmass spectrometer (Thermo Fisher Scientific). Mass spectra were recorded in the positive ionmode. Mass spectral deconvolution was performed using ProMass software (Novatia).

GAPDH mRNA Pull-Down

[0554] Total RNA was isolated from HeLa-S3 cells using Trizol reagent according to the manufacturer's instructions (Life Technologies). Cas9-sgRNA complexes were reconstituted before pull-down experiments by incubating a twofold molar excess of Cas9 with sgRNA for 10 min at 37° C. in reaction buffer. HeLa total RNA (40 μg) or HeLa lysate (˜5×10⁶ cells) was added to reaction buffer with 40 U RNasin (Promega), PAMmer (5 mM) and the biotin-dCas9 (50 nM)-sgRNA (25 nM) in a total volume of 100 ml and incubated at 37° C. for 1 h. This mixture was then added to 25 ml magnetic streptavidin beads (Dynabeads MyOne Streptavidin Cl; Life Technologies) pre-equilibrated in reaction buffer and agitated at 4° C. for 2 h. Beads were then washed six times with 300 ml wash buffer (20 mM Tris-HCl, pH7.5, 150 mM NaCl, 5 mM MgCl₂, 0.1% Triton X-100, 5% glycerol, 1 mM DTT, 10 mg/ml heparin). Immobilized RNA was eluted by heating beads at 70° C. in the presence of DEPC-treated water and a phenol/chloroform mixture. Eluates were then treated with an equal volume of glyoxal loading dye (Life Technologies) and heated at 50° C. for 1 h before separation via 1% BPTE agarose gel (30 mM Bis-Tris, 10 mM PIPES, 10 mM EDTA, pH 6.5). Following Northern blot transfers, membranes were crosslinked using UV radiation and incubated in pre-hybridization buffer (UltraHYB Ultrasensitive Hybridization Buffer; Life Technologies) for 1 h at 46° C. before hybridization. Radioactive northern probes were synthesized using random priming of GAPDH and β-actin partial cDNAs (for cDNA primers, see Table 2) in the presence of [α-³²P]dATP (PerkinElmer), using a Prime-It II Random Primer Labelling kit (Agilent Technologies). Hybridization was carried out for 3 h in pre-hybridization buffer at 46° C. followed by two washes with 23×SSC (300 mM NaCl, 30 mM trisodiumcitrate, pH 7, 0.5% (w/v) SDS) for 15 min at 46° C. Membranes were imaged using a phosphorscreen.

TABLE 2
RNA and DNA substrates used in Example 5
(all sequence are 5′ to 3′ unless otherwise denoted).

| | | | SEQ |
|---|---|---|---|
| Description | Sequence^{a} | Used in: | ID NO: |
| Oligo for | TAATACGACTCACTATA | NA | 1404 |
| preparing dsDNA | | | |
| T7 promoter, | | | |
| in vitro | | | |
| transcription | | | |
| λ-targeting | GUGAUAAGUGGAAUGCCAUGGUUUUAGAGCUA | FIG. 18c-e, | 1407 |
| crRNA | UGCUGUUUUG | 20a, 21c-d, 22, | |
| | | 23, 25a | |
| λ3-targeting | CUGGUGAACUUCCGAUAGUGGUUUUAGAGCUA | FIG. 20a | 1408 |
| crRNA | UGCUGUUUUG | | |
| λ4-targeting | CAGATATAGCCTGGTGGTTCGUUUUAGAGCUA | FIG. 20a | 1409 |
| crRNA | UGCUGUUUUG | | |
| ssDNA T7 | AAAAAGCACCGACTCGGTGCCACTTTTTCAAG | NA | 1415 |
| template^{b}: | TTGATAACGGACTAGCCTTATTTTAACTTGCT | | |
| tracrRNA | ATGCTGTCCTATAGTGAGTCGTATTA | | |
| tracrRNA | GGACAGCAUAGCAAGUUAAAAUAAGGCUAGUC | FIG. 18c-e, | 1416 |
| (nt 15-87) | CGUUAUCAACUUGAAAAAGUGGCACCGAGUCG | 20a, 21c-d, | |
| | GUGCUUUUU | 22, 23, 25a | |
| λ2-targeting | TAATACGACTCACTATAGGTGATAAGTGGAAT | NA | 1479 |
| sgRNA | GCCATGGTTTTAGAGCTATGCTGTTTTGGAAA | | |
| T7 template^{c} | CAAAACAGCATAGCAAGTTAAAATAAGGCTAG | | |
| | TCCGTTATCAACTTGAAAAAGTGGCACCGAGT | | |
| | CGGTGCTTTTTTT | | |
| λ2-targeting | GGUGAUAAGUGGAAUGCCAUGGUUUUAGAGCU | FIG. 19, 20b, | 1480 |
| sgRNA | AUGCUGUUUUGGAAACAAAACAGCAUAGCAAG | d, 24, 25b | |
| | UUAAAAUAAGGCUAGUCCGUUAUCAACUUGAA | | |
| | AAAGUGGCACCGAGUCGGUGCUUUUUUU | | |
| λ2 target | 5′-GAGTGGAAGGATGCCAGTGATAAGTGGAA | FIG. 18c, | 1419 |
| dsDNA duplex | TGCCATGTGGGCTGTCAAAATTGAGC-3′ | 19a, 25c | |
| | 3′-CTCACCTTCCTACGGTCACTATTCACCTT | | 1420 |
| | ACGGTACACCCGACAGTTTTAACTCG-5′ | | |
| λ2 ssDNA | 3′-CTCACCTTCCTACGGTCACTATTCACCTT | FIG. 18c, 19a, | 1481 |
| target strand | ACGGTACACCCGACAGTTTTAACTCG-5′ | | |
| (used to make | | | |
| heteroduplex | | | |
| DNA: RNA) | | | |
| λ2 ssDNA | GAGTGGAAGGATGCCAGTGATAAGTGGAATGC | FIG. 18c, 19a, | 1463 |
| non-target | CATGTGGGCTGTCAAAATTGAGC | 20d, 24 | |
| strand | | | |
| (used to make | | | |
| heteroduplex | | | |
| DNA: RNA) | | | |
| λ2 ssRNA | GAGTGGAAGGATGCCAGTGATAAGTGGAATGC | NA | 1482 |
| target strand | CATGTGGGCTGTCAAAATTGAGCCTATAGTGA | | |
| T7 template | GTCGTATTA | | |
| λ2 ssRNA | 3′-CUCACCUUCCUACGGUCACUAUUCACCUU | FIG. 18c-e, | 1483 |
| target strand | ACGGUACACCCGACAGUUUUAACUCGG-5′ | 19-25 | |
| λ2 ssRNA | GCTCAATTTTGACAGCCCACATGGCATTCCAC | NA | 1484 |
| non-target | TTATCACTGGCATCCTTCCACTCCTATAGTGA | | |
| strand | GTCGTATTA | | |
| T7 template | | | |
| λ2 ssRNA | GGAGTGGAAGGATGCCAGTGATAAGTGGA | FIG. 18c, 19a | 1485 |
| non-target | ATGCCATGTGGGCTGTCAAAATTGAGC | | |
| strand (used to | | | |
| make dsRNA) | | | |
| 19 nt λ2 DNA | TGGGCTGTCAAAATTGAGC | FIG. 18c-e, 19, | 1466 |
| PAMmer | | 20a-b, 22-25 | |
| 18 nt λ2 “GG” | GGGCTGTCAAAATTGAGC | FIG. 18c, 19 | 1486 |
| PAMmer | | | |
| 19 nt λ2 DNA | ACCGCTGTCAAAATTGAGC | FIG. 18c, 19c | 1487 |
| mutated PAMmer | | | |
| 16 nt λ2 DNA | GCTGTCAAAATTGAGC | FIG. 18c, 19c | 1465 |
| “PAM-less” | | | |
| PAMmer | | | |
| 18 nt λ2 RNA | GGGCUGUCAAAAUUGAGC | FIG. 18c, 19a | 1488 |
| PAMmer | | | |
| 5 nt λ2 DNA | TGGGC | FIG. 18e, 19c | |
| PAMmer | | | |
| 10 nt λ2 DNA | TGGGCTGTCA | FIG. 18e, 19c | 1489 |
| PAMmer | | | |
| 15 nt λ2 DNA | TGGGCTGTCAAAATT | FIG. 18e, 19c | 1490 |
| PAMmer | | | |
| λ3 ssRNA | AACGTGCTGCGGCTGGCTGGTGAACTTCCGAT | NA | 1491 |
| target strand | AGTGCGGGTGTTGAATGATTTCCTATAGTGAG | | |
| T7 template | TCGTATTA | | |
| λ3 ssRNA | 3′-UUGCACGACGCCGACCGACCACUUGAAGG | FIG. 20a, b, d, | 1492 |
| target strand | CUAUCACGCCCACAACUUACUAAAGG-5′ | 24, 25b | |
| λ4 ssRNA | TCACAACAATGAGTGGCAGATATAGCCTGGTG | NA | 1493 |
| target strand | GTTCAGGCGGCGCATTTTTATTGCCTATAGTG | | |
| T7 template | AGTCGTATTA | | |
| ssRNA | 3′-AGUGUUGUUACUCACCGUCUAUAUCGGAC | FIG. 20a, b, d, | 1494 |
| target strand | CACCAAGUCCGCCGCGUAAAAAUAACGG-5′ | 24 | |
| λ3 ssDNA | AACGTGCTGCGGCTGGCTGGTGAACTTCCGAT | FIG. 20d, 24 | 1421 |
| non-target | AGTGCGGGTGTTGAATGATTTCC | | |
| strand | | | |
| λ4 ssDNA | TCACAACAATGAGTGGCAGATATAGCCTGGTG | FIG. 20d, 24 | 1423 |
| non-target | GTTCAGGCGGCGCATTTTTATTG | | |
| strand | | | |
| 19 nt λ3 DNA | CGGGTGTTGAATGATTTCC | FIG. 20a, b, d, | 1495 |
| PAMmer | | 24, 25 | |
| 19 nt λ4 DNA | AGGCGGCGCATTTTTATTG | FIG. 20a, b, d, | 1496 |
| PAMmer | | 24 | |
| 21 nt λ2 | 5′-TGTGGGCTGTCAAAATTGAGC | FIG. 21c, 25a, | 1497 |
| extended | | b | |
| DNA PAMmer | | | |
| 21 nt λ3 | 5′-TGCGGGTGTTGAATGATTTCC | 25b | 1498 |
| extended | | | |
| DNA PAMmer | | | |
| 24 nt λ2 | 5′-CCATGTGGGCTGTCAAAATTGAGC | 25a, b | 1499 |
| extended | | | |
| DNA PAMmer | | | |
| 24 nt λ3 | 5′-TAGTGCGGGTGTTGAATGATTTCC | 25b | 1500 |
| extended | | | |
| DNA PAMmer | | | |
| 27 nt λ2 | 5′-ATGCCATGTGGGCTGTCAAAATTGAGC | FIG. 21f, g, | 1501 |
| extended | | 25a, b | |
| DNA PAMmer | | | |
| 27 nt λ3 | 5′-CGATAGTGCGGGTGTTGAATGATTTCC | 25b | 1502 |
| extended | | | |
| DNA PAMmer | | | |
| 30 nt λ2 | 5′-GGAATGCCATGTGGGCTGTCAAAATTGAG | 25a, b | 1503 |
| extended | C | | |
| DNA PAMmer | | | |
| 30 nt λ3 | 5′-TTCCGATAGTGCGGGTGTTGAATGATTTC | 25b | 1504 |
| extended | C | | |
| DNA PAMmer | | | |
| 33 nt λ2 | 5′-AGTGGAATGCCATGTGGGCTGTCAAAATT | 25a,b | 1505 |
| extended | GAGC | | |
| DNA PAMmer | | | |
| 33 nt λ3 | 5′-AACTTCCGATAGTGCGGGTGTTGAATGAT | 25b | 1506 |
| extended | TTCC | | |
| DNA PAMmer | | | |
| 36 nt λ2 | 5′-ATAAGTGGAATGCCATGTGGGCTGTCAAA | 25a | 1507 |
| extended | ATTGAGC | | |
| DNA PAMmer | | | |
| 39 nt λ2 | 5′-GTGATAAGTGGAATGCCATGTGGGCTGTC | 25a, b | 1508 |
| extended | AAAATTGAGC | | |
| DNA PAMmer | | | |
| 39 nt λ3 | 5′-CTGGTGAACTTCCGATAGTGCGGGTGTTG | 25b | 1509 |
| extended | AATGATTTCC | | |
| DNA PAMmer | | | |
| non-PAM λ2 | 5′-GAGTGGAAGGATGCCAGTGATAAGTGGAA | FIG. 21c | 1510 |
| dsDNA | TGCCATGACCGCTGTCAAAATTGAGC-3′ | | |
| | 3′-CTCACCTTCCTACGGTCACTATTCACCTT | | 1511 |
| | ACGGTACTGGCGACAGTTTTAACTCG-5′ | | |
| non-PAM λ2 | GAGTGGAAGGATGCCAGTGATAAGTGGAATGC | NA | 1512 |
| ssRNA target | CATGACCGCTGTCAAAATTGAGCCTATAGTGA | | |
| strand T7 | GTCGTATTA | | |
| template | | | |
| non-PAM λ2 | 3′-CUCACCUUCCUACGGUCACUAUUCACCUU | FIG. 21c | 1513 |
| ssRNA target | ACGGUACTGGCGACAGUUUUAACUCGG-5′ | | |
| strand | | | |
| λ2 2′OMe | *UGGGCTGTCAAAATTGAG*C | 27 | 1514 |
| capped PAMmer^{d} | | | |
| λ2 PS capped | T*GGGCTGTCAAAATTGAG*C | 27 | 1515 |
| PAMmer^{d} | | | |
| λ2 2′F capped | *UGGGCTGTCAAAATTGAG*C | 27 | 1516 |
| PAMmerd | | | |
| λ2 LNA | *TGGGCTGTCAAAATTGAG*C | 27 | 1517 |
| capped PAMmer^{d} | | | |
| λ2 19 nt | *UGGGC*UGTCA*AAATT*GAG*C | 27 | 1518 |
| 2′OMe | | | |
| interspersed | | | |
| PAMmer^{d} | | | |
| GAPDH-tar- | TAATACGACTCACTATAGGGGCAGAGATGATG | FIG. 21f, g, 28 | 1519 |
| geting sgRNA 1 | ACCCTGTTTAAGAGCTATGCTGGAAACAGCAT | | |
| T7 template^{e} | AGCAAGTTTAAATAAGGCTAGTCCGTTATCAA | | |
| | CTTGAAAAAGTGGCACCGAGTCGGTGCTTTTT | | |
| | TT | | |
| GAPDH- | GGGGCAGAGAUGAUGACCCUGUUUAAGAGCUA | FIG. 21f, g, 28 | 1520 |
| targeting | UGCUGGAAACAGCAUAGCAAGUUUAAAUAAGG | | |
| sgRNA 1 | CUAGUCCGUUAUCAACUUGAAAAAGUGGCACC | | |
| | GAGUCGGUGCUUUUUUU | | |
| GAPDH- | TAATACGACTCACTATAGGCCAAAGTTGTCAT | FIG. 21f, | 1521 |
| targeting | GGATGACGTTTAAGAGCTATGCTGGAAACAGC | 28 | |
| sgRNA 2 | ATAGCAAGTTTAAATAAGGCTAGTCCGTTATC | | |
| T7 templat^{e} | AACTTGAAAAAGTGGCACCGAGTCGGTGCTTT | | |
| | TTTT | | |
| GAPDH- | GGCCAAAGUUGUCAUGGAUGACGUUUAAGAGC | FIG. 21f, 28 | 1522 |
| targeting | UAUGCUGGAAACAGCAUAGCAAGUUUAAAUAA | | |
| sgRNA 2 | GGCUAGUCCGUUAUCAACUUGAAAAAGUGGCA | | |
| | CCGAGUCGGUGCUUUUUUU | | |
| GAPDH- | TAATACGACTCACTATAGGCCAAAGTTGTCAT | FIG. 21f, 28 | 1521 |
| targeting | GGATGACGTTTAAGAGCTATGCTGGAAACAGC | | |
| sgRNA 3 | ATAGCAAGTTTAAATAAGGCTAGTCCGTTATC | | |
| T7 template^{e} | AACTTGAAAAAGTGGCACCGAGTCGGTGCTTT | | |
| | TTTT | | |
| GAPDH- | GGAUGUCAUCAUAUUUGGCAGGGUUUAAGAGC | FIG. 21f, 28 | 1523 |
| targeting | UAUGCUGGAAACAGCAUAGCAAGUUUAAAUAA | | |
| sgRNA 3 | GGCUAGUCCGUUAUCAACUUGAAAAAGUGGCA | | |
| | CCGAGUCGGUGCUUUUUUU | | |
| GAPDH- | TAATACGACTCACTATAGGATGTCATCATATT | FIG. 21f, 28 | 1524 |
| targeting | TGGCAGGGTTTAAGAGCTATGCTGGAAACAGC | | |
| sgRNA 4 | ATAGCAAGTTTAAATAAGGCTAGTCCGTTATC | | |
| T7 template^{e} | AACTTGAAAAAGTGGCACCGAGTCGGTGCTTT | | |
| | TTTT | | |
| GAPDH- | GGATGTCATCATATTTGGCAGGGTTTAAGAGC | FIG. 21f, 28 | 1525 |
| targeting | TATGCTGGAAACAGCATAGCAAGTTTAAATAA | | |
| sgRNA 4 | GGCTAGTCCGTTATCAACTTGAAAAAGTGGCA | | |
| | CCGAGTCGGTGCTTTTTTT | | |
| GAPDH | ATGACCCTTGGGGCTCCCCCCTGCAAA | FIG. 21, f, g | 1526 |
| PAMmer 1 | | 28 | |
| GAPDH | TGGATGACCGGGGCCAGGGGTGCTAAG | FIG. 21f, 28 | 1527 |
| PAMmer 2 | | | |
| GAPDH | TTGGCAGGTGGTTCTAGACGGCAGGTC | FIG. 21f, 28 | 1528 |
| PAMmer 3 | | | |
| GAPDH | CCCCAGCGTGGAAGGTGGAGGAGTGGG | FIG. 21f, 28 | 1529 |
| PAMmer 4 | | | |
| GAPDH | A*UGACC*CTAGG*GGCTC*CCCCC*UGCAA | FIG. 21g, 28 | 1474 |
| PAMmer 1 | *A | | |
| 2′OMe vl | | | |
| GAPDH | *ATG*ACCC*UAGG*GGCT*CCCC*CCTG*CA | FIG. 21g, 28 | 1475 |
| PAMmer 1 | A*A | | |
| 2′OMe v2 | | | |
| GAPDH | *ATG*ACC*CU*AGG*GGC*UCC*CCC*CTG* | FIG. 21g, 28 | 1476 |
| PAMmer 1 | CAA*A | | |
| 2′OMe v3 | | | |
| GAPDH | *AT*GA*CC*CT*AGG*GG*CT*CC*CC*CC* | FIG. 21g, 28 | 1477 |
| PAMmer 1 | UG*CA*AA | | |
| 2′OMe v4 | | | |
| GAPDH | *AT*GA*CC*CT*AG*GG*GC*TC*CC*CC*C | FIG. 21g, 28 | 1530 |
| PAMmer 1 | U*GC*AA*A | | |
| 2′OMe v5 | | | |
| GAPDH cDNA | CTCACTGTTCTCTCCCTCCGC | FIG. 21g, f | 1531 |
| primer Fwd | | | |
| GAPDH cDNA | AGGGGTCTACATGGCAACTG | FIG. 21g, f | 1532 |
| primer Rev | | | |
| β-actin cDNA | AGAAAATCTGGCACCACACC | FIG. 21g, f | 1533 |
| primer Fwd | | | |
| β-actin cDNA | GGAGTACTTGCGCTCAGGAG | FIG. 21g, f | 1534 |
| primer Rev | | | |

*Guide crRNA sequences and complementary DNA target strand sequences are shown in red.
PAM sites (5′-NGG-3′) are highlighted in yellow on the non-target strand when adjacent to the
target sequence or in the PAMmer oligonucleotides.
^{†}The T7 promoter is indicated in bold (or reverse complement of), as well as 5′ G or GG
included in the ssRNA product by T7 polymerase.
NA, not applicable.
^{‡}sgRNA template obtained from pIDT, subsequently linearised by AflII for run-off
transcription.
^{§}Positions of modifications depicted with asterisks preceding each modified nucleotide in each
case (except for PS linkages which are depicted between bases)
PS: phosphorothioate bond
LNA: locked nucleic acid

[0555] While the present invention has been described with reference to the specific embodiments thereof, it should be understood by those skilled in the art that various changes may be made and equivalents may be substituted without departing from the true spirit and scope of the invention. In addition, many modifications may be made to adapt a particular situation, material, composition of matter, process, process step or steps, to the objective, spirit and scope of the present invention. All such modifications are intended to be within the scope of the claims appended hereto.

What is claimed is:

1. A method of cleaving a single stranded target nucleic acid, the method comprising:
contacting the single stranded target nucleic acid with:
(i) a Cas9 polypeptide;
(ii) a guide nucleic acid comprising:
(a) a targeting segment comprising a nucleotide sequence that is complementary to a first target nucleotide sequence in the single stranded target nucleic acid, and
(b) a protein-binding segment comprising two stretches of nucleotides that hybridize with one another to form a double-stranded RNA duplex that interacts with the Cas9 polypeptide; and
(iii) a PAMmer, wherein the PAMmer is a single stranded oligonucleotide comprising:
(a) a protospacer adjacent motif (PAM) sequence, and
(b) at least one of:
(i) an orientation segment, positioned 3′ of the PAM sequence, comprising a nucleotide sequence that is complementary to a second target nucleotide sequence in the target nucleic acid; and
(ii) a specificity segment, positioned 5′ of the PAM sequence, comprising a nucleotide sequence that is complementary to said first target nucleotide sequence.

2. The method according to claim 1, wherein the single stranded target nucleic acid is a single stranded RNA (ssRNA).

3. The method according to claim 2, wherein the target ssRNA is selected from: mRNA, rRNA, tRNA, non-coding RNA (ncRNA), long non-coding RNA (lncRNA), and microRNA (miRNA).

4. The method according to claim 3, wherein the target ssRNA is mRNA and the method results in reduced production of a protein encoded by the mRNA.

5. The method according to claim 1, wherein the single stranded target nucleic acid is single stranded DNA (ssDNA).

6. The method according to any of claims 1 to 5, wherein the single stranded target nucleic acid is from a virus.

7. The method according to any of claims 1 to 6, wherein the PAMmer is covalently linked to the guide nucleic acid.

8. The method according to any of claims 1 to 7, wherein the PAMmer is covalently linked to the Cas9 polypeptide.

9. The method according to any of claims 1 to 8, wherein the PAMmer comprises an orientation segment.

10. The method according to any of claims 1 to 9, wherein the PAMmer does not comprise a specificity segment.

11. The method according to claim 10, wherein the PAM sequence is the 5′ end of the PAMmer.

12. The method according to any of claims 1 to 9, wherein the PAMmer comprises a specificity segment.

13. The method according to any of claims 1 to 8 or claim 12, wherein the PAMmer does not comprise an orientation segment.

14. The method according to claim 13, wherein the PAM sequence is the 3′ end of the PAMmer.

15. The method according to any of claims 1 to 8, wherein the PAMmer comprises an orientation segment and a specificity segment.

16. The method according to any of claims 1 to 15, wherein the PAMmer comprises a detectable label.

17. The method according to claim 16, wherein the detectable label is a fluorescent label.

18. The method according to any of claims 1 to 17, wherein the PAM sequence is GG.

19. The method according to any of claims 1 to 17, wherein the PAM sequence is 5′-NGG-3′ and N can be any nucleotide.

20. The method of any of claims 1 to 19, wherein said contacting is outside of a cell in vitro.

21. The method according to any of claims 1 to 19, wherein said contacting is in a cell in vitro or ex vivo.

22. The method according to any of claims 1 to 19, wherein said contacting is in a cell in vivo.

23. The method according to any of claims 1 to 22, wherein the guide nucleic acid is a DNA/RNA hybrid nucleic acid and the first segment of the guide nucleic acid comprises DNA.

24. The method according to any of claims 1 to 22, wherein the guide nucleic acid is a guide RNA.

25. The method according to any of claims 1 to 24, wherein the guide nucleic acid is a dual guide nucleic acid, wherein the two stretches of nucleotides that hybridize with one another are present on separate nucleic acid molecules.

26. The method according to any of claims 1 to 24, wherein the guide nucleic acid is a single guide nucleic acid, wherein the two stretches of nucleotides that hybridize with one another are present on the same nucleic acid molecule and are covalently linked by intervening nucleotides.

27. The method according to any of claims 1 to 26, wherein the target nucleic acid:
(i) does not have a nucleotide sequence that is complementary to the PAM sequence at a position within 10 nucleotides of the 3′ end of the specificity segment of the PAMmer; or
(ii) does not have a nucleotide sequence that is complementary to the PAM sequence at a position within 10 nucleotides of the 5′ end of the orientation segment of the PAMmer.

28. The method according to any of claims 1 to 27, wherein 10 or less nucleotides are present in the target nucleic acid between the first and second target nucleotide sequences.

29. The method according to any of claims 1 to 28, wherein 2 or 3 nucleotides are present in the target nucleic acid between the first and second target nucleotide sequences.

30. A method of binding a single stranded target nucleic acid, the method comprising:
contacting the single stranded target nucleic acid with:
(i) a variant Cas9 polypeptide having an amino acid mutation that results in reduced nuclease activity relative to a corresponding wild type Cas9 polypeptide; and
(ii) a guide nucleic acid comprising:
(a) a targeting segment comprising a nucleotide sequence that is complementary to a first target nucleotide sequence in the single stranded target nucleic acid, and
(b) a protein-binding segment comprising two stretches of nucleotides that hybridize with one another to form a double-stranded RNA duplex that interacts with the Cas9 polypeptide,
wherein said contacting produces a variant-Cas9/target complex.

31. The method according to claim 30, further comprising contacting the single stranded target nucleic acid with a PAMmer, wherein the PAMmer is a single stranded oligonucleotide comprising:
(a) a protospacer adjacent motif (PAM) sequence, and
(b) at least one of:
(i) an orientation segment, positioned 3′ of the PAM sequence, comprising a nucleotide sequence that is complementary to a second target nucleotide sequence in the target nucleic acid; and
(ii) a specificity segment, positioned 5′ of the PAM sequence, comprising a nucleotide sequence that is complementary to said first target nucleotide sequence.

32. The method according to claim 31, wherein the PAMmer comprises a detectable label.

33. The method according to claim 31 or claim 32, wherein the PAMmer comprises an orientation segment and a specificity segment.

34. The method according to any of claims 30 to 33, wherein the variant Cas9 polypeptide comprises at least one of:
(i) an H840A mutation of the S. pyogenes Cas9 amino acid sequence (SEQ ID NO:8) or the corresponding mutation in the amino acid sequence set forth in any of SEQ ID NOs: 1-7, 9-256, and 795-1346; and
(ii) W476A and W1126A mutations of the S. pyogenes Cas9 amino acid sequence (SEQ ID NO:8) or the corresponding mutation in the amino acid sequence set forth in any of SEQ ID NOs: 1-7, 9-256, and 795-1346.

35. The method according to any of claims 30 to 33, wherein the variant Cas9 polypeptide comprises at least one of:
(i) D10A and H840A mutations of the S. pyogenes Cas9 amino acid sequence (SEQ ID NO:8) or the corresponding mutations in the amino acid sequence set forth in any of SEQ ID NOs: 1-7, 9-256, and 795-1346; and
(ii) W476A and W1126A mutations of the S. pyogenes Cas9 amino acid sequence (SEQ ID NO:8) or the corresponding mutation in the amino acid sequence set forth in any of SEQ ID NOs: 1-7, 9-256, and 795-1346.

36. The method according to any of claims 30 to 35, wherein the variant Cas9 polypeptide comprises a detectable label.

37. The method according to claim 36, wherein the detectable label of the Cas9 polypeptide is a fluorescent protein.

38. The method according to any of claims 30 to 37, wherein the guide nucleic acid comprises a detectable label.

39. The method according to claim 38, wherein the detectable label of the guide nucleic acid is a directly detectable label.

40. The method according to claim 38, wherein the detectable label of the guide nucleic acid is an indirectly detectable label.

41. The method according to claim 40, wherein the indirectly detectable label of the guide nucleic acid is a nucleotide sequence that specifically binds a labeling protein.

42. The method according to any of claims 30 to 41, wherein the variant Cas9 polypeptide comprises a fusion partner with an enzymatic activity, and the single stranded target nucleic acid is modified as a result of the method.

43. The method according to any of claims 30 to 42, further comprising:
isolating the variant-Cas9/target complex;
releasing the single stranded target nucleic acid from the variant-Cas9/target complex; and
collecting and/or analyzing the released single stranded target nucleic acid and/or a polypeptide associated with the single stranded target nucleic acid.

44. A hybrid guide nucleic acid, comprising:
(i) a targeting segment comprising a DNA nucleotide sequence that is complementary to a first target nucleotide sequence in a target nucleic acid; and
(ii) a protein-binding segment that comprises RNA, forms a double-stranded RNA duplex, and interacts with a Cas9 polypeptide.

45. The hybrid guide nucleic acid of claim 44, wherein the protein-binding segment of the hybrid guide nucleic acid comprises a nucleotide sequence with 60% or more identity over a stretch of 8 or more contiguous nucleotides to a nucleotide sequence set forth in any of SEQ ID NOs: 431-682, or a complement thereof.

46. The hybrid guide nucleic acid of claim 44 or claim 45, wherein the hybrid guide nucleic acid is a dual guide nucleic acid.

47. The hybrid guide nucleic acid of claim 44 or claim 45, wherein the hybrid guide nucleic acid is a single guide nucleic acid.

48. The hybrid guide nucleic acid of any of claims 44 to 47, wherein the guide nucleic acid is covalently linked to a PAMmer, wherein the PAMmer is a single stranded oligonucleotide comprising:
a protospacer adjacent motif (PAM) sequence, and at least one of:
(i) an orientation segment, positioned 3′ of the PAM sequence, comprising a nucleotide sequence that is complementary to a second target nucleotide sequence in the target nucleic acid; and
(ii) a specificity segment, positioned 5′ of the PAM sequence, comprising a nucleotide sequence that is complementary to said first target nucleotide sequence.

49. A PAM-modified Cas9 polypeptide, comprising a Cas9 polypeptide that is conjugated to a PAMmer, wherein the PAMmer is a single stranded oligonucleotide comprising:
(a) a protospacer adjacent motif (PAM) sequence, and
(b) at least one of:
(i) an orientation segment, positioned 3′ of the PAM sequence, comprising a nucleotide sequence that is complementary to a second target nucleotide sequence in the target nucleic acid, and
(ii) a specificity segment, positioned 5′ of the PAM sequence, comprising a nucleotide sequence that is complementary to said first target nucleotide sequence.

50. A composition comprising:
(i) a PAMmer, wherein the PAMmer is a single stranded oligonucleotide comprising:
(a) a protospacer adjacent motif (PAM) sequence, and
(b) at least one of:
(b.i) an orientation segment, positioned 3′ of the PAM sequence, comprising a nucleotide sequence that is complementary to a first target nucleotide sequence in a target nucleic acid, and
(b.ii) a specificity segment, positioned 5′ of the PAM sequence, comprising a nucleotide sequence that is complementary to a second target nucleotide sequence in a target nucleic acid; and
at least one of:
(ii) a Cas9 polypeptide, or a nucleic acid encoding the same; and
(iii) a guide nucleic acid, or a nucleic acid encoding the same, wherein the guide nucleic acid comprises:
(a) a targeting segment comprising a nucleotide sequence that is complementary to said first target nucleotide sequence in said single stranded target nucleic acid, and
(b) a protein-binding segment comprising two stretches of nucleotides that hybridize with one another to form a double-stranded RNA duplex that interacts with a Cas9 polypeptide.

51. The composition of claim 50, wherein the guide nucleic acid is a guide RNA.

52. The composition of claim 50, wherein the guide nucleic acid is a DNA/RNA hybrid guide nucleic acid, wherein the targeting segment of the guide nucleic acid comprises DNA.

53. The composition of any of claims 50 to 52, wherein the guide nucleic acid is a dual guide nucleic acid, wherein the two stretches of nucleotides that hybridize with one another are present on separate nucleic acid molecules.

54. The composition of any of claims 50 to 52, wherein the guide nucleic acid is a single guide nucleic acid, wherein the two stretches of nucleotides that hybridize with one another are present on the same nucleic acid molecule and are covalently linked by intervening nucleotides.

55. The composition of any of claims 50 to 54, wherein the PAM sequence is the 5′ end of the PAMmer.

56. The composition of any of claims 50 to 55, wherein the PAM sequence is GG.

57. The composition of any of claims 50 to 55, wherein the PAM sequence is 5′-NGG-3′ and N can be any nucleotide.

58. The composition of any of claims 50 to 57, wherein 10 or less nucleotides are present in the target nucleic acid between the first and second target sequences.

59. The composition of any of claims 50 to 58, wherein 2 or 3 nucleotides are present in the target nucleic acid between the first and second target sequences.

60. The composition of any of claims 50 to 59, wherein the Cas9 polypeptide is a variant Cas9 polypeptide having reduced nuclease activity relative to a corresponding wild type Cas9 polypeptide.

61. A kit comprising:
(i) a guide nucleic acid, or a nucleic acid encoding the same, wherein the guide nucleic acid comprises:
(a) a targeting segment comprising a nucleotide sequence that is complementary to a first target sequence in a target nucleic acid, and
(b) a protein-binding segment comprising two stretches of nucleotides that hybridize with one another to form a double-stranded RNA duplex that interacts with a Cas9 polypeptide; and
(ii) a PAMmer, or a nucleic acid encoding the same, wherein the PAMmer is a single stranded oligonucleotide comprising:
(a) a protospacer adjacent motif (PAM) sequence, and
(b) at least one of:
(b.i) an orientation segment, positioned 3′ of the PAM sequence, comprising a nucleotide sequence that is complementary to a second target sequence in the target nucleic acid, and
(b.ii) a specificity segment, positioned 5′ of the PAM sequence, comprising a nucleotide sequence that is complementary to said first target sequence.

64. A library comprising:
two or more targeting nucleic acid pairs, wherein each targeting pair comprises:
(i) a guide nucleic acid, or a nucleic acid encoding the same, wherein the guide nucleic acid comprises:
(a) a targeting segment comprising a nucleotide sequence that is complementary to a first target sequence in a target nucleic acid, and
(b) a protein-binding segment comprising two stretches of nucleotides that hybridize with one another to form a double-stranded RNA duplex that interacts with a Cas9 polypeptide; and
(ii) a PAMmer, or a nucleic acid encoding the same, wherein the PAMmer is a single stranded oligonucleotide comprising:
(a) a protospacer adjacent motif (PAM) sequence, and
(b) at least one of:
(b.i) an orientation segment, positioned 3′ of the PAM sequence, comprising a nucleotide sequence that is complementary to a second target sequence in the target nucleic acid, and
(b.ii) a specificity segment, positioned 5′ of the PAM sequence, comprising a nucleotide sequence that is complementary to said first target sequence in the target nucleic acid.

The application's sequence listing, which the Patent Office published only in electronic form, follows.

SEQUENCE LISTING (1551 sequences)

SEQ ID NO: 1 - protein, 1056 aa, Pasteurella multocida
MQTTNLSYILGLDLGIASVGWAVVEINENEDPIGLIDVGVRIFERAEVPKTGESLALSRRLARSTRRLIRRRAHRLLLAKRFLKREGILSTIDLEKGLPNQAWELRVAGLERRLSAIEWGAVLLHLIKHRGYLSKRKNESQTNNKELGALLSGVAQNHQLLQSDDYRTPAELALKKFAKEEGHIRNQRGAYTHTFNRLDLLAELNLLFAQQHQFGNPHCKEHIQQYMTELLMWQKPALSGEAILKMLGKCTHEKNEFKAAKHTYSAERFVWLTKLNNLRILEDGAERALNEEERQLLINHPYEKSKLTYAQVRKLLGLSEQAIFKHLRYSKENAESATFMELKAWHAIRKALENQGLKDTWQDLAKKPDLLDEIGTAFSLYKTDEDIQQYLTNKVPNSVINALLVSLNFDKFIELSLKSLRKILPLMEQGKRYDQACREIYGHHYGEANQKTSQLLPAIPAQEIRNPVVLRTLSQARKVINAIIRQYGSPARVHIETGRELGKSFKERREIQKQQEDNRTKRESAVQKFKELFSDFSSEPKSKDILKFRLYEQQHGKCLYSGKEINIHRLNEKGYVEIDHALPFSRTWDDSFNNKVLVLASENQNKGNQTPYEWLQGKINSERWKNFVALVLGSQCSAAKKQRLLTQVIDDNKFIDRNLNDTRYIARFLSNYIQENLLLVGKNKKNVFTPNGQITALLRSRWGLIKARENNNRHHALDAIVVACATPSMQQKITRFIRFKEVHPYKIENRYEMVDQESGEIISPHFPEPWAYFRQEVNIRVFDNHPDTVLKEMLPDRPQANHQFVQPLFVSRAPTRKMSGQGHMETIKSAKRLAEGISVLRIPLTQLKPNLLENMVNKEREPALYAGLKARLAEFNQDPAKAFATPFYKQGGQQVKAIRVEQVQKSGVLVRENNGVADNASIVRTDVFIKNNKFFLVPIYTWQVAKGILPNKAIVAHKNEDEWEEMDEGAKFKFSLFPNDLVELKTKKEYFFGYYIGLDRATGNISLKEHDGEISKGKDGVYRVGVKLALSFEKYQVDELGKNRQICRPQQRQPVR

SEQ ID NO: 2 - protein, 1368 aa, Streptococcus pyogenes [sequence omitted]

SEQ ID NO: 3 - protein, 1334 aa, Listeria innocua
MKKPYTIGLDIGTNSVGWAVLTDQYDLVKRKMKIAGDSEKKQIKKNFWGVRLFDEGQTAADRRMARTARRRIERRRNRISYLQGIFAEEMSKTDANFFCRLSDSFYVDNEKRNSRHPFFATIEEEVEYHKNYPTIYHLREELVNSSEKADLRLVYLALAHIIKYRGNFLIEGALDTQNTSVDGIYKQFIQTYNQVFASGIEDGSLKKLEDNKDVAKILVEKVTRKEKLERILKLYPGEKSAGMFAQFISLIVGSKGNFQKPFDLIEKSDIECAKDSYEEDLESLLALIGDEYAELFVAAKNAYSAVVLSSIITVAETETNAKLSASMIERFDTHEEDLGELKAFIKLHLPKHYEEIFSNTEKHGYAGYIDGKTKQADFYKYMKMTLENIEGADYFIAKIEKENFLRKQRTFDNGAIPHQLHLEELEAILHQQAKYYPFLKENYDKIKSLVTFRIPYFVGPLANGQSEFAWLTRKADGEIRPWNIEEKVDFGKSAVDFIEKMTNKDTYLPKENVLPKHSLCYQKYLVYNELTKVRYINDQGKTSYFSGQEKEQIFNDLFKQKRKVKKKDLELFLRNMSHVESPTIEGLEDSFNSSYSTYHDLLKVGIKQEILDNPVNTEMLENIVKILTVFEDKRMIKEQLQQFSDVLDGVVLKKLERRHYTGWGRLSAKLLMGIRDKQSHLTILDYLMNDDGLNRNLMQLINDSNLSFKSIIEKEQVTTADKDIQSIVADLAGSPAIKKGILQSLKIVDELVSVMGYPPQTIVVEMARENQTTGKGKNNSRPRYKSLEKAIKEFGSQILKEHPTDNQELRNNRLYLYYLQNGKDMYTGQDLDIHNLSNYDIDHIVPQSFITDNSIDNLVLTSSAGNREKGDDVPPLEIVRKRKVFWEKLYQGNLMSKRKFDYLTKAERGGLTEADKARFIHRQLVETRQITKNVANILHQRFNYEKDDHGNTMKQVRIVTLKSALVSQFRKQFQLYKVRDVNDYHHAHDAYLNGVVANTLLKVYPQLEPEFVYGDYHQFDWFKANKATAKKQFYTNIMLFFAQKDRIIDENGEILWDKKYLDTVKKVMSYRQMNIVKKTEIQKGEFSKATIKPKGNSSKLIPRKTNWDPMKYGGLDSPNMAYAVVIEYAKGKNKLVFEKKIIRVTIMERKAFEKDEKAFLEEQGYRQPKVLAKLPKYTLYECEEGRRRMLASANEAQKGNQQVLPNHLVTLLHHAANCEVSDGKSLDYIESNREMFAELLAHVSEFAKRYTLAEANLNKINQLFEQNKEGDIKAIAQSFVDLMAFNAMGAPASFKFFETTIERKRYNNLKELLNSTIIYQSITGLYESRKRLDD

SEQ ID NO: 4 - protein, 1368 aa, Streptococcus pyogenes
MDKKYSIGLDIGTNSVGWAVITDDYKVPSKKLKGLGNTDRHGIKKNLIGALLFDSGETAEATRLKRTARRRYTRRKNRICYLQEIFSNEMAKVDDSFFHRLEESFLVEEDKKHERHPIFGNIVDEVAYHEKYPTIYHLRKKLADSTDKVDLRLIYLALAHMIKFRGHFLIEGDLNPDNSDVDKLFIQLVQTYNQLFEENPINASRVDAKAILSARLSKSRRLENLIAQLPGEKKNGLFGNLIALSLGLTPNFKSNFDLAEDAKLQLSKDTYDDDLDNLLAQIGDQYADLFLAAKNLSDATLLSDILRVNSEITKAPLSASMIKRYDEHHQDLTLLKALVRQQLPEKYKEIFFDQSKNGYAGYIDGGASQEEFYKFIKPILEKMDGTEELLAKLNREDLLRKQRTFDNGSIPYQIHLGELHAILRRQEDFYPFLKDNREKIEKILTFRIPYYVGPLARGNSRFAWMTRKSEETITPWNFEEVVDKGASAQSFIERMTNFDKNLPNEKVLPKHSLLYEYFTVYNELTKVKYVTEGMRKPAFLSGEQKKAIVDLLFKTNRKVTVKQLKEDYFKKIECFDSVEISGVEDRFNASLGTYHDLLKIIKDKDFLDNEENEDILEDIVLTLTLFEDREMIEERLKTYAHLFDDKVMKQLKRRRYTGWGRLSRKLINGIRDKQSGKTILDFLKSDGFANRNFMQLIHDDSLTFKEDIQKAQVSGQGDSLHEHIANLAGSPAIKKGILQTVKVVDELVKVMGRHKPENIVIEMARENQTTQKGQKNSRERMKRIEEGIKELGSDILKEYPVENTQLQNEKLYLYYLQNGRDMYVDQELDINRLSDYDVDHIVPQSFLKDDSIDNKVLTRSDKNRGKSDNVPSEEVVKKMKNYWRQLLNAKLITQRKFDNLTKAERGGLSELDKVGFIKRQLVETRQITKHVAQILDSRMNTKYDENDKLIREVRVITLKSKLVSDFRKDFQFYKVREINNYHHAHDAYLNAVVGTALIKKYPKLESEFVYGDYKVYDVRKMIAKSEQEIGKATAKYFFYSNIMNFFKTEITLANGEIRKRPLIETNGETGEIVWDKGRDFATVRKVLSMPQVNIVKKTEVQTGGFSKESILPKRNSDKLIARKKDWDPKKYGGFDSPTVAYSVLVVAKVEKGKSKKLKSVKELLGITIMERSSFEKDPIDFLEAKGYKEVRKDLIIKLPKYSLFELENGRKRMLASAGELQKGNELALPSKYVNFLYLASHYEKLKGSPEDNEQKQLFVEQHKHYLDEIIEQISEFSKRVILADANLDKVLSAYNKHRDKPIREQAENIIHLFTLTNLGAPAAFKYFDTTIDRKRYTSTKEVLDATLIHQSITGLYETRIDLSQLGGD

SEQ ID NO: 5 - protein, 1370 aa, Streptococcus agalactiae
MNKPYSIGLDIGTNSVGWSIITDDYKVPAKKMRVLGNTDKEYIKKNLIGALLFDGGNTAADRRLKRTARRRYTRRRNRILYLQEIFAEEMSKVDDSFFHRLEDSFLVEEDKRGSKYPIFATLQEEKDYHEKFSTIYHLRKELADKKEKADLRLIYIALAHIIKFRGHFLIEDDSFDVRNTDISKQYQDFLEIFNTTFENNDLLSQNVDVEAILTDKISKSAKKDRILAQYPNQKSTGIFAEFLKLIVGNQADFKKYFNLEDKTPLQFAKDSYDEDLENLLGQIGDEFADLFSAAKKLYDSVLLSGILTVIDLSTKAPLSASMIQRYDEHREDLKQLKQFVKASLPEKYQEIFADSSKDGYAGYIEGKTNQEAFYKYLSKLLTKQEDSENFLEKIKNEDFLRKQRTFDNGSIPHQVHLTELKAIIRRQSEYYPFLKENQDRIEKILTFRIPYYIGPLAREKSDFAWMTRKTDDSIRPWNFEDLVDKEKSAEAFIHRMTNNDFYLPEEKVLPKHSLIYEKFTVYNELTKVRYKNEQGETYFFDSNIKQEIFDGVFKEHRKVSKKKLLDFLAKEYEEFRIVDVIGLDKENKAFNASLGTYHDLEKILDKDFLDNPDNESILEDIVQTLTLFEDREMIKKRLENYKDLFTESQLKKLYRRHYTGWGRLSAKLINGIRDKESQKTILDYLIDDGRSNRNFMQLINDDGLSFKSIISKAQAGSHSDNLKEVVGELAGSPAIKKGILQSLKIVDELVKVMGYEPEQIVVEMARENQTTNQGRRNSRQRYKLLDDGVKNLASDLNGNILKEYPTDNQALQNERLFLYYLQNGRDMYTGEALDIDNLSQYDIDHIIPQAFIKDDSIDNRVLVSSAKNRGKSDDVPSLEIVKDCKVFWKKLLDAKLMSQRKYDNLTKAERGGLTSDDKARFIQRQLVETRQITKHVARILDERFNNELDSKGRRIRKVKIVTLKSNLVSNFRKEFGFYKIREVNNYHHAHDAYLNAVVAKAILTKYPQLEPEFVYGDYPKYNSYKTRKSATEKLFFYSNIMNFFKTKVTLADGTVVVKDDIEVNNDTGEIVWDKKKHFATVRKVLSYPQNNIVKKTEIQTGGFSKESILAHGNSDKLIPRKTKDIYLDPKKYGGFDSPIVAYSVLVVADIKKGKAQKLKTVTELLGITIMERSRFEKNPSAFLESKGYLNIRADKLIILPKYSLFELENGRRRLLASAGELQKGNELALPTQFMKFLYLASRYNESKGKPEEIEKKQEFVNQHVSYFDDILQLINDFSKRVILADANLEKINKLYQDNKENISVDELANNIINLFTFTSLGAPAAFKFFDKIVDRKRYTSTKEVLNSTLIHQSITGLYETRIDLGKLGED

SEQ ID NO: 6 - protein, 1345 aa, Streptococcus mutans
MKKPYSIGLDIGTNSVGWAVVTDDYKVPAKKMKVLGNTDKSHIEKNLLGALLFDSGNTAEDRRLKRTARRRYTRRRNRILYLQEIFSEEMGKVDDSFFHRLEDSFLVTEDKRGERHPIFGNLEEEVKYHENFPTIYHLRQYLADNPEKVDLRLVYLALAHIIKFRGHFLIEGKFDTRNNDVQRLFQEFLAVYDNTFENSSLQEQNVQVEEILTDKISKSAKKDRVLKLFPNEKSNGRFAEFLKLIVGNQADFKKHFELEEKAPLQFSKDTYEEELEVLLAQIGDNYAELFLSAKKLYDSILLSGILTVTDVGTKAPLSASMIQRYNEHQMDLAQLKQFIRQKLSDKYNEVFSDVSKDGYAGYIDGKTNQEAFYKYLKGLLNKIEGSGYFLDKIEREDFLRKQRTFDNGSIPHQIHLQEMRAIIRRQAEFYPFLADNQDRIEKLLTFRIPYYVGPLARGKSDFAWLSRKSADKITPWNFDEIVDKESSAEAFINRMTNYDLYLPNQKVLPKHSLLYEKFTVYNELTKVKYKTEQGKTAFFDANMKQEIFDGVFKVYRKVTKDKLMDFLEKEFDEFRIVDLTGLDKENKVFNASYGTYHDLCKILDKDFLDNSKNEKILEDIVLTLTLFEDREMIRKRLENYSDLLTKEQVKKLERRHYTGWGRLSAELIHGIRNKESRKTILDYLIDDGNSNRNFMQLINDDALSFKEEIAKAQVIGETDNLNQVVSDIAGSPAIKKGILQSLKIVDELVKIMGHQPENIVVEMARENQFTNQGRRNSQQRLKGLTDSIKEFGSQILKEHPVENSQLQNDRLFLYYLQNGRDMYTGEELDIDYLSQYDIDHIIPQAFIKDNSIDNRVLTSSKENRGKSDDVPSKDVVRKMKSYWSKLLSAKLITQRKFDNLTKAERGGLTDDDKAGFIKRQLVETRQITKHVARILDERFNTETDENNKKIRQVKIVTLKSNLVSNFRKEFELYKVREINDYHHAHDAYLNAVIGKALLGVYPQLEPEFVYGDYPHFHGHKENKATAKKFFYSNIMNFFKKDDVRTDKNGEIIWKKDEHISNIKKVLSYPQVNIVKKVEEQTGGFSKESILPKGNSDKLIPRKTKKFYWDTKKYGGFDSPIVAYSILVIADIEKGKSKKLKTVKALVGVTIMEKMTFERDPVAFLERKGYRNVQEENIIKLPKYSLFKLENGRKRLLASARELQKGNEIVLPNHLGTLLYHAKNIHKVDEPKHLDYVDKHKDEFKELLDVVSNFSKKYTLAEGNLEKIKELYAQNNGEDLKELASSFINLLTFTAIGAPATFKFFDKNIDRKRYTSTTEILNATLIHQSITGLYETRIDLNKLGGD

SEQ ID NO: 7 - protein, 1377 aa, Streptococcus agalactiae
MNKPYSIGLDIGTNSVGWSIITDDYKVPAKKMRVLGNTDKEYIKKNLIGALLFDGGNTAADRRLKRTARRRYTRRRNRILYLQEIFAEEMSKVDDSFFHRLEDSFLVEEDKRGSKYPIFATMQEEKYYHEKFPTIYHLRKELADKKEKADLRLVYLALAHIIKFRGHFLIEDDRFDVRNTDIQKQYQAFLEIFDTTFENNHLLSQNVDVEAILTDKISKSAKKDRILAQYPNQKSTGIFAEFLKLIVGNQADFKKHFNLEDKTPLQFAKDSYDEDLENLLGQIGDEFADLFSVAKKLYDSVLLSGILTVTDLSTKAPLSASMIQRYDEHHEDLKHLKQFVKASLPENYREVFADSSKDGYAGYIEGKTNQEAFYKYLLKLLTKQEGSEYFLEKIKNEDFLRKQRTFDNGSIPHQVHLTELRAIIRRQSEYYPFLKENQDRIEKILTFRIPYYVGPLAREKSDFAWMTRKTDDSIRPWNFEDLVDKEKSAEAFIHRMTNNDLYLPEEKVLPKHSLIYEKFTVYNELTKVRFLAEGFKDFQFLNRKQKETIFNSLFKEKRKVTEKDIISFLNKVDGYEGIAIKGIEKQFNASLSTYHDLKKILGKDFLDNTDNELILEDIVQTLTLFEDREMIKKCLDIYKDFFTESQLKKLYRRHYTGWGRLSAKLINGIRNKENQKTILDYLIDDGSANRNFMQLINDDDLSFKPIIDKARTGSHSDNLKEVVGELAGSPAIKKGILQSLKIVDELVKVMGYEPEQIVVEMARENQTTAKGLSRSRQRLTTLRESLANLKSNILEEKKPKYVKDQVENHHLSDDRLFLYYLQNGRDMYTKKALDIDNLSQYDIDHIIPQAFIKDDSIDNRVLVSSAKNRGKSDDVPSIEIVKARKMFWKNLLDAKLMSQRKYDNLTKAERGGLTSDDKARFIQRQLVETRQITKHVARILDERFNNEVDNGKKICKVKIVTLKSNLVSNFRKEFGFYKIREVNDYHHAHDAYLNAVVAKAILTKYPQLEPEFVYGMYRQKKLSKIVHEDKEEKYSEATRKMFFYSNLMNMFKRVVRLADGSIVVRPVIETGRYMRKTAWDKKKHFATVRKVLSYPQNNIVKKTEIQTGGFSKESILAHGNSDKLIPRKTKDIYLDPKKYGGFDSPIVAYSVLVVADIKKGKAQKLKTVTELLGITIMERSRFEKNPSAFLESKGYLNIRDDKLMILPKYSLFELENGRRRLLASAGELQKGNELALPTQFMKFLYLASRYNESKGKPEEIEKKQEFVNQHVSYFDDILQLINDFSKRVILADANLEKINKLYQDNKENIPVDELANNIINLFTFTSLGAPAAFKFFDKIVDRKRYTSTKEVLNSTLIHQSITGLYETRIDLGKLGED

SEQ ID NO: 8 - protein, 1368 aa, Streptococcus pyogenes; identical to SEQ ID NO: 4

SEQ ID NO: 9 - protein, 131 aa, Helicobacter hepaticus
MRILGFDIGITSIGWAYVESNELKDCGVRIFTKAENPKNGDSLAAPRREARGARRRLARRKARLNAIKRLLCKEFELNLNDYLANDGELPKAYQTSKDTKSPYELYTAFHWIIFAFCSIASSLSNRQMLPI

SEQ ID NO: 10 - protein, 1059 aa, Wolinella succinogenes
MIERILGVDLGISSLGWAIVEYDKDDEAANRIIDCGVRLFTAAETPKKKESPNKARREARGIRRVLNRRRVRMNMIKKLFLRAGLIQDVDLDGEGGMFYSKANRADVWELRHDGLYRLLKGDELARVLIHIAKHRGYKFIGDDEADEESGKVKKAGVVLRQNFEAAGCRTVGEWLWRERGANGKKRNKHGDYEISIHRDLLVEEVEAIFVAQQEMRSTIATDALKAAYREIAFFVRPMQRIEKMVGHCTYFPEERRAPKSAPTAEKFIAISKFFSTVIIDNEGWEQKIIERKTLEELLDFAVSREKVEFRHLRKFLDLSDNEIFKGLHYKGKPKTAKKREATLFDPNEPTELEFDKVEAEKKAWISLRGAAKLREALGNEFYGRFVALGKHADEATKILTYYKDEGQKRRELTKLPLEAEMVERLVKIGFSDFLKLSLKAIRDILPAMESGARYDEAVLMLGVPHKEKSAILPPLNKTDIDILNPTVIRAFAQFRKVANALVRKYGAFDRVHFELAREINTKGEIEDIKESQRKNEKERKEAADWIAETSFQVPLTRKNILKKRLYIQQDGRCAYTGDVIELERLFDEGYCEIDHILPRSRSADDSFANKVLCLARANQQKTDRTPYEWFGHDAARWNAFETRTSAPSNRVRTGKGKIDRLLKKNFDENSEMAFKDRNLNDTRYMARAIKTYCEQYWVFKNSHTKAPVQVRSGKLTSVLRYQWGLESKDRESHTHHAVDAIIIAFSTQGMVQKLSEYYRFKETHREKERPKLAVPLANFRDAVEEATRIENTETVKEGVEVKRLLISRPPRARVTGQAHEQTAKPYPRIKQVKNKKKWRLAPIDEEKFESFKADRVASANQKNFYETSTIPRVDVYHKKGKFHLVPIYLHEMVLNELPNLSLGTNPEAMDENFFKFSIFKDDLISIQTQGTPKKPAKIIMGYFKNMHGANMVLSSINNSPCEGFTCTPVSMDKKHKDKCKLCPEENRIAGRCLQGFLDYWSQEGLRPPRKEFECDQGVKFALDVKKYQIDPLGYYYEVKQEKRLGTIPQMRSAKKLVKK

SEQ ID NO: 11 - protein, 1409 aa, Wolinella succinogenes
MLVSPISVDLGGKNTGFFSFTDSLDNSQSGTVIYDESFVLSQVGRRSKRHSKRNNLRNKLVKRLFLLILQEHHGLSIDVLPDEIRGLFNKRGYTYAGFELDEKKKDALESDTLKEFLSEKLQSIDRDSDVEDFLNQIASNAESFKDYKKGFEAVFASATHSPNKKLELKDELKSEYGENAKELLAGLRVTKEILDEFDKQENQGNLPRAKYFEELGEYIATNEKVKSFFDSNSLKLTDMTKLIGNISNYQLKELRRYFNDKEMEKGDIWIPNKLHKITERFVRSWHPKNDADRQRRAELMKDLKSKEIMELLTTTEPVMTIPPYDDMNNRGAVKCQTLRLNEEYLDKHLPNWRDIAKRLNHGKFNDDLADSTVKGYSEDSTLLHRLLDTSKEIDIYELRGKKPNELLVKTLGQSDANRLYGFAQNYYELIRQKVRAGIWVPVKNKDDSLNLEDNSNMLKRCNHNPPHKKNQIHNLVAGILGVKLDEAKFAEFEKELWSAKVGNKKLSAYCKNIEELRKTHGNTFKIDIEELRKKDPAELSKEEKAKLRLTDDVILNEWSQKIANFFDIDDKHRQRFNNLFSMAQLHTVIDTPRSGFSSTCKRCTAENRFRSETAFYNDETGEFHKKATATCQRLPADTQRPFSGKIERYIDKLGYELAKIKAKELEGMEAKEIKVPIILEQNAFEYEESLRKSKTGSNDRVINSKKDRDGKKLAKAKENAEDRLKDKDKRIKAFSSGICPYCGDTIGDDGEIDHILPRSHTLKIYGTVFNPEGNLIYVHQKCNQAKADSIYKLSDIKAGVSAQWIEEQVANIKGYKTFSVLSAEQQKAFRYALFLQNDNEAYKKVVDWLRTDQSARVNGTQKYLAKKIQEKLTKMLPNKHLSFEFILADATEVSELRRQYARQNPLLAKAEKQAPSSHAIDAVMAFVARYQKVFKDGTPPNADEVAKLAMLDSWNPASNEPLTKGLSTNQKIEKMIKSGDYGQKNMREVFGKSIFGENAIGERYKPIVVQEGGYYIGYPATVKKGYELKNCKVVTSKNDIAKLEKIIKNQDLISLKENQYIKIFSINKQTISELSNRYFNMNYKNLVERDKEIVGLLEFIVENCRYYTKKVDVKFAPKYIHETKYPFYDDWRRFDEAWRYLQENQNKTSSKDRFVIDKSSLNEYYQPDKNEYKLDVDTQPIWDDFCRWYFLDRYKTANDKKSIRIKARKTFSLLAESGVQGKVFRAKRKIPTGYAYQALPMDNNVIAGDYANILLEANSKTLSLVPKSGISIEKQLDKKLDVIKKTDVRGLAIDNNSFFNADFDTHGIRLIVENTSVKVGNFPISAIDKSAKRMIFRALFEKEKGKRKKKTTISFKESGPVQDYLKVFLKKIVKIQLRTDGSISNIVVRKNAADFTLSFRSEHIQKLLK

SEQ ID NO: 12 - protein, 1374 aa, Fusobacterium nucleatum
MKKQKFSDYYLGFDIGTNSVGWCVTDLDYNVLRFNKKDMWGSRLFDEAKTAAERRVQRNSRRRLKRRKWRLNLLEEIFSDEIMKIDSNFFRRLKESSLWLEDKNSKEKFTLFNDDNYKDYDFYKQYPTIFHLRDELIKNPEKKDIRLIYLALHSIFKSRGHFLFEGQNLKEIKNFETLYNNLISFLEDNGINKSIDKDNIEKLEKIICDSGKGLKDKEKEFKGIFNSDKQLVAIFKLSVGSSVSLNDLFDTDEYKKEEVEKEKISFREQIYEDDKPIYYSILGEKIELLDIAKSFYDFMVLNNILSDSNYISEAKVKLYEEHKKDLKNLKYIIRKYNKENYDKLFKDKNENNYPAYIGLNKEKDKKEVVEKSRLKIDDLIKVIKGYLPKPERIEEKDKTIFNEILNKIELKTILPKQRISDNGTLPYQIHEVELEKILENQSKYYDFLNYEENGVSTKDKLLKTFKFRIPYYVGPLNSYHKDKGGNSWIVRKEEGKILPWNFEQKVDIEKSAEEFIKRMTNKCTYLNGEDVIPKDSFLYSEYIILNELNKVQVNDEFLNEENKRKIIDELFKENKKVSEKKFKEYLLVNQIANRTVELKGIKDSFNSNYVSYIKFKDIFGEKLNLDIYKEISEKSILWKCLYGDDKKIFEKKIKNEYGDILNKDEIKKINSFKFNTWGRLSEKLLTGIEFINLETGECYSSVMEALRRTNYNLMELLSSKFTLQESIDNENKEMNEVSYRDLIEESYVSPSLKRAILQTLKIYEEIKKITGRVPKKVFIEMARGGDESMKNKKIPARQEQLKKLYDSCGNDIANFSIDIKEMKNSLSSYDNNSLRQKKLYLYYLQFGKCMYTGREIDLDRLLQNNDTYDIDHIYPRSKVIKDDSFDNLVLVLKNENAEKSNEYPVKKEIQEKMKSFWRFLKEKNFISDEKYKRLTGKDDFELRGFMARQLVNVRQTTKEVGKILQQIEPEIKIVYSKAEIASSFREMFDFIKVRELNDTHHAKDAYLNIVAGNVYNTKFTEKPYRYLQEIKENYDVKKIYNYDIKNAWDKENSLEIVKKNMEKNTVNITRFIKEEKGELFNLNPIKKGETSNEIISIKPKLYDGKDNKLNEKYGYYTSLKAAYFIYVEHEKKNKKVKTFERITRIDSTLIKNEKNLIKYLVSQKKLLNPKIIKKIYKEQTLIIDSYPYTFTGVDSNKKVELKNKKQLYLEKKYEQILKNALKFVEDNQGETEENYKFIYLKKRNNNEKNETIDAVKERYNIEFNEMYDKFLEKLSSKDYKNYINNKLYTNFLNSKEKFKKLKLWEKSLILREFLKIFNKNTYGKYEIKDSQTKEKLFSFPEDTGRIRLGQSSLGNNKELLEESVTGLFVKKIKL

SEQ ID NO: 13 - protein, 1084 aa, Corynebacterium diphtheriae
MKYHVGIDVGTFSVGLAAIEVDDAGMPIKTLSLVSHIHDSGLDPDEIKSAVTRLASSGIARRTRRLYRRKRRRLQQLDKFIQRQGWPVIELEDYSDPLYPWKVRAELAASYIADEKERGEKLSVALRHIARHRGWRNPYAKVSSLYLPDGPSDAFKAIREEIKRASGQPVPETATVGQMVTLCELGTLKLRGEGGVLSARLQQSDYAREIQEICRMQEIGQELYRKIIDVVFAAESPKGSASSRVGKDPLQPGKNRALKASDAFQRYRIAALIGNLRVRVDGEKRILSVEEKNLVFDHLVNLTPKKEPEWVTIAEILGIDRGQLIGTATMTDDGERAGARPPTHDTNRSIVNSRIAPLVDWWKTASALEQHAMVKALSNAEVDDFDSPEGAKVQAFFADLDDDVHAKLDSLHLPVGRAAYSEDTLVRLTRRMLSDGVDLYTARLQEFGIEPSWTPPTPRIGEPVGNPAVDRVLKTVSRWLESATKTWGAPERVIIEHVREGFVTEKRAREMDGDMRRRAARNAKLFQEMQEKLNVQGKPSRADLWRYQSVQRQNCQCAYCGSPITFSNSEMDHIVPRAGQGSTNTRENLVAVCHRCNQSKGNTPFAIWAKNTSIEGVSVKEAVERTRHWVTDTGMRSTDFKKFTKAVVERFQRATMDEEIDARSMESVAWMANELRSRVAQHFASHGTTVRVYRGSLTAEARRASGISGKLKFFDGVGKSRLDRRHHAIDAAVIAFTSDYVAETLAVRSNLKQSQAHRQEAPQWREFTGKDAEHRAAWRVWCQKMEKLSALLTEDLRDDRVVVMSNVRLRLGNGSAHKETIGKLSKVKLSSQLSVSDIDKASSEALWCALTREPGFDPKEGLPANPERHIRVNGTHVYAGDNIGLFPVSAGSIALRGGYAELGSSFHHARVYKITSGKKPAFAMLRVYTIDLLPYRNQDLFSVELKPQTMSMRQAEKKLRDALATGNAEYLGWLVVDDELVVDTSKIATDQVKAVEAELGTIRRWRVDGFFSPSKLRLRPLQMSKEGIKKESAPELSKIIDRPGWLPAVNKLFSDGNVTVVRRDSLGRVRLESTAHLPVTWKVQ

SEQ ID NO: 14 - protein, 1395 aa, Treponema denticola
MKKEIKDYFLGLDVGTGSVGWAVTDTDYKLLKANRKDLWGMRCFETAETAEVRRLHRGARRRIERRKKRIKLLQELFSQEIAKTDEGFFQRMKESPFYAEDKTILQENTLFNDKDFADKTYHKAYPTINHLIKAWIENKVKPDPRLLYLACHNIIKKRGHFLFEGDFDSENQFDTSIQALFEYLREDMEVDIDADSQKVKEILKDSSLKNSEKQSRLNKILGLKPSDKQKKAITNLISGNKINFADLYDNPDLKDAEKNSISFSKDDFDALSDDLASILGDSFELLLKAKAVYNCSVLSKVIGDEQYLSFAKVKIYEKHKTDLTKLKNVIKKHFPKDYKKVFGYNKNEKNNNNYSGYVGVCKTKSKKLIINNSVNQEDFYKFLKTILSAKSEIKEVNDILTEIETGTFLPKQISKSNAEIPYQLRKMELEKILSNAEKHFSFLKQKDEKGLSHSEKIIMLLTFKIPYYIGPINDNHKKFFPDRCWVVKKEKSPSGKTTPWNFFDHIDKEKTAEAFITSRTNFCTYLVGESVLPKSSLLYSEYTVLNEINNLQIIIDGKNICDIKLKQKIYEDLFKKYKKITQKQISTFIKHEGICNKTDEVIILGIDKECTSSLKSYIELKNIFGKQVDEISTKNMLEEIIRWATIYDEGEGKTILKTKIKAEYGKYCSDEQIKKILNLKFSGWGRLSRKFLETVTSEMPGFSEPVNIITAMRETQNNLMELLSSEFTFTENIKKINSGFEDAEKQFSYDGLVKPLFLSPSVKKMLWQTLKLVKEISHITQAPPKKIFIEMAKGAELEPARTKTRLKILQDLYNNCKNDADAFSSEIKDLSGKIENEDNLRLRSDKLYLYYTQLGKCMYCGKPIEIGHVFDTSNYDIDHIYPQSKIKDDSISNRVLVCSSCNKNKEDKYPLKSEIQSKQRGFWNFLQRNNFISLEKLNRLTRATPISDDETAKFIARQLVETRQATKVAAKVLEKMFPETKIVYSKAETVSMFRNKFDIVKCREINDFHHAHDAYLNIVVGNVYNTKFTNNPWNFIKEKRDNPKIADTYNYYKVFDYDVKRNNITAWEKGKTIITVKDMLKRNTPIYTRQAACKKGELFNQTIMKKGLGQHPLKKEGPFSNISKYGGYNKVSAAYYTLIEYEEKGNKIRSLETIPLYLVKDIQKDQDVLKSYLTDLLGKKEFKILVPKIKINSLLKINGFPCHITGKTNDSFLLRPAVQFCCSNNEVLYFKKIIRFSEIRSQREKIGKTISPYEDLSFRSYIKENLWKKTKNDEIGEKEFYDLLQKKNLEIYDMLLTKHKDTIYKKRPNSATIDILVKGKEKFKSLIIENQFEVILEILKLFSATRNVSDLQHIGGSKYSGVAKIGNKISSLDNCILIYQSITGIFEKRIDLLKV

SEQ ID NO: 15 - protein, 1334 aa, Listeria monocytogenes
MKNPYTIGLDIGTNSVGWAVLTNQYDLVKRKMKVAGNSDKKQIKKNFWGVRLFDDGQTAVDRRMNRTARRRIERRRNRISYLQEIFAVEMANIDANFFCRLNDSFYVDSEKRNSRHPFFATIEEEVAYHDNYRTIYHLREKLVNSSEKADLRLVYLALAHIIKYRGNFLIEGALDTKNTSVDEVYKQFIETYNQVFMSNIEEGALAKVEENIEVANILAGKFTRREKFERILQLYPGEKSTGMFAQFISLIVGSKGNFQKVFDLIEKTDIECAKDSYEEDLETLLAIIGDEYAELFVAAKNTYNAVVLSSIITVTDTETNAKLSASMIERFDAHEKDLVELKAFIKLNLPKQYEEIFSNAAIDGYAGYIDGKTKQVDFYKYLKTILENIEGSDYFIAKIEEENFLRKQRTFDNGAIPHQLHLEELEAIIHQQAKYYPFLKEDYDKIKSLVTFRIPYFVGPLANGQSEFAWLTRKADGEIRPWNIEEKVDFGKSAVDFIEKMTNKDTYLPKENVLPKHSLCYQKYMVYNELTKIRYIDDQGKTNYFSGREKQQVFNDLFKQKRKVKKKDLELFLRNINHIESPTIEGLEDSFNASYATYHDLLKVGMKQEILDNPLNTEMLEDIVKILTVFEDKPMIKEQLQQFSDVLDGGVLKKLERRHYTGWGRLSAKLLVGIREKQSHLTILDYLMNDDGLNRNLMQLINDSNLSFKSIIEKEQVSTTDKDLQSIVAELAGSPAIKKGILQSLKIVDELVSIMGYPPQTIVVEMARENQTTGKGKNNSKPRYKSLEKAIKEFGSQILKEHPTDNQELKNNRLYLYYLQNGKDMYTGQELDIHNLSNYDIDHIVPQSFITDNSIDNLVLTSSAGNREKGGDVPPLEIVRKRKVFWEKLYQGNLMSKRKFDYLTKAERGGLTEADKARFIHRQLVETRQITKNVANILYQRFNKETDNHGNTMEQVRIVTLKSALVSQFRKQFQLYKVREVNGYHHAHDAYLNGVVANTLLKVYPQLEPEFVYGEYHQFDWFKANKATAKKQFYTNIMLFFAQKERIIDENGEILWDKKYLETIKKVLDYRQMNIVKKTEIQKGEFSKATIKPKGNSSKLIPRKENWDPMKYGGLDSPNMAYAVIIEHAKGKKKIVIEKKLIQINIMERKMFEKDEEAFLEEKGYRHPKVLTKLPKYTLYECEKGRRRMLASANEAQKGNQLVLSNHLVSLLYHAKNCEASDGKSLKYIEAHRETFSELLAQVSEFATRYTLADANLSKINNLFEQNKEGDIKAIAQSFVDLMAFNAMGAPASFKFFEATIDRKRYTNLKELLSSTIIYQSITGLYESRKRLDD

SEQ ID NO: 16 - protein, 1236 aa, Mycoplasma mobile
MYFYKNKENKLNKKVVLGLDLGIASVGWCLTDISQKEDNKFPIILHGVRLFETVDDSDDKLLNETRRKKRGQRRRNRRLFTRKRDFIKYLIDNNIIELEFDKNPKILVRNFIEKYINPFSKNLELKYKSVTNLPIGFHNLRKAAINEKYKLDKSELIVLLYFYLSLRGAFFDNPEDTKSKEMNKNEIEIFDKNESIKNAEFPIDKIIEFYKISGKIRSTINLKFGHQDYLKEIKQVFEKQNIDFMNYEKFAMEEKSFFSRIRNYSEGPGNEKSFSKYGLYANENGNPELIINEKGQKIYTKIFKTLWESKIGKCSYDKKLYRAPKNSFSAKVFDITNKLTDWKHKNEYISERLKRKILLSRFLNKDSKSAVEKILKEENIKFENLSEIAYNKDDNKINLPIINAYHSLTTIFKKHLINFENYLISNENDLSKLMSFYKQQSEKLFVPNEKGSYEINQNNNVLHIFDAISNILNKFSTIQDRIRILEGYFEFSNLKKDVKSSEIYSEIAKLREFSGTSSLSFGAYYKFIPNLISEGSKNYSTISYEEKALQNQKNNFSHSNLFEKTWVEDLIASPTVKRSLRQTMNLLKEIFKYSEKNNLEIEKIVVEVTRSSNNKHERKKIEGINKYRKEKYEELKKVYDLPNENTTLLKKLWLLRQQQGYDAYSLRKIEANDVINKPWNYDIDHIVPRSISFDDSFSNLVIVNKLDNAKKSNDLSAKQFIEKIYGIEKLKEAKENWGNWYLRNANGKAFNDKGKFIKLYTIDNLDEFDNSDFINRNLSDTSYITNALVNHLTFSNSKYKYSVVSVNGKQTSNLRNQIAFVGIKNNKETEREWKRPEGFKSINSNDFLIREEGKNDVKDDVLIKDRSFNGHHAEDAYFITIISQYFRSFKRIERLNVNYRKETRELDDLEKNNIKFKEKASFDNFLLINALDELNEKLNQMRFSRMVITKKNTQLFNETLYSGKYDKGKNTIKKVEKLNLLDNRTDKIKKIEEFFDEDKLKENELTKLHIFNHDKNLYETLKIIWNEVKIEIKNKNLNEKNYFKYFVNKKLQEGKISFNEWVPILDNDFKIIRKIRYIKFSSEEKETDEIIFSQSNFLKIDQRQNFSFHNTLYWVQIWVYKNQKDQYCFISIDARNSKFEKDEIKINYEKLKTQKEKLQIINEEPILKINKGDLFENEEKELFYIVGRDEKPQKLEIKYILGKKIKDQKQIQKPVKKYFPNWKKVNLTYMGEIFKK

SEQ ID NO: 17 - protein, 1372 aa, Legionella pneumophila
MESSQILSPIGIDLGGKFTGVCLSHLEAFAELPNHANTKYSVILIDHNNFQLSQAQRRATRHRVRNKKRNQFVKRVALQLFQHILSRDLNAKEETALCHYLNNRGYTYVDTDLDEYIKDETTINLLKELLPSESEHNFIDWFLQKMQSSEFRKILVSKVEEKKDDKELKNAVKNIKNFITGFEKNSVEGHRHRKVYFENIKSDITKDNQLDSIKKKIPSVCLSNLLGHLSNLQWKNLHRYLAKNPKQFDEQTFGNEFLRMLKNFRHLKGSQESLAVRNLIQQLEQSQDYISILEKTPPEITIPPYEARTNTGMEKDQSLLLNPEKLNNLYPNWRNLIPGIIDAHPFLEKDLEHTKLRDRKRIISPSKQDEKRDSYILQRYLDLNKKIDKFKIKKQLSFLGQGKQLPANLIETQKEMETHFNSSLVSVLIQIASAYNKEREDAAQGIWFDNAFSLCELSNINPPRKQKILPLLVGAILSEDFINNKDKWAKFKIFWNTHKIGRTSLKSKCKEIEEARKNSGNAFKIDYEEALNHPEHSNNKALIKIIQTIPDIIQAIQSHLGHNDSQALIYHNPFSLSQLYTILETKRDGFHKNCVAVTCENYWRSQKTEIDPEISYASRLPADSVRPFDGVLARMMQRLAYEIAMAKWEQIKHIPDNSSLLIPIYLEQNRFEFEESFKKIKGSSSDKTLEQAIEKQNIQWEEKFQRIINASMNICPYKGASIGGQGEIDHIYPRSLSKKHFGVIFNSEVNLIYCSSQGNREKKEEHYLLEHLSPLYLKHQFGTDNVSDIKNFISQNVANIKKYISFHLLTPEQQKAARHALFLDYDDEAFKTITKFLMSQQKARVNGTQKFLGKQIMEFLSTLADSKQLQLEFSIKQITAEEVHDHRELLSKQEPKLVKSRQQSFPSHAIDATLTMSIGLKEFPQFSQELDNSWFINHLMPDEVHLNPVRSKEKYNKPNISSTPLFKDSLYAERFIPVWVKGETFAIGFSEKDLFEIKPSNKEKLFTLLKTYSTKNPGESLQELQAKSKAKWLYFPINKTLALEFLHHYFHKEIVTPDDTTVCHFINSLRYYTKKESITVKILKEPMPVLSVKFESSKKNVLGSFKHTIALPATKDWERLFNHPNFLALKANPAPNPKEFNEFIRKYFLSDNNPNSDIPNNGHNIKPQKHKAVRKVFSLPVIPGNAGTMMRIRRKDNKGQPLYQLQTIDDTPSMGIQINEDRLVKQEVLMDAYKTRNLSTIDGINNSEGQAYATFDNWLTLPVSTFKPEIIKLEMKPHSKTRRYIRITQSLADFIKTIDEALMIKPSDSIDDPLNMPNEIVCKNKLFGNELKPRDGKMKIVSTGKIVTYEFESDSTPQWIQTLYVTQLKKQP

SEQ ID NO: 18 - protein, 1122 aa, Streptococcus thermophilus
MSDLVLGLDIGIGSVGVGILNKVTGEIIHKNSRIFPAAQAENNLVRRTNRQGRRLTRRKKHRIVRLNRLFEESGLITDFTKISINLNPYQLRVKGLTDELSNEELFIALKNMVKHRGISYLDDASDDGNSSVGDYAQIVKENSKQLETKTPGQIQLERYQTYGQLRGDFTVEKDGKKHRLINVFPTSAYRSEALRILQTQQEFNSQITDEFINRYLEILTGKRKYYHGPGNEKSRTDYGRYRTNGETLDNIFGILIGKCTFYPDEFRAAKASYTAQEFNLLNDLNNLTVPTETKKLSKEQKNQIINYVKNEKVMGPAKLFKYIAKLLSCDVADIKGHRIDKSGKAEIHTFEAYRKMKTLETLDIEQMDRETLDKLAYVLTLNTEREGIQEALEHEFADGSFSQKQVDELVQFRKANSSIFGKGWHNFSVKLMMELIPELYETSEEQMTILTRLGKQKTTSSSNKTKYIDEKLLTEEIYNPVVAKSVRQAIKIVNAAIKEYGDFDNIVIEMARETNEDDEKKAIQKIQKANKDEKDAAMLKAANQYNGKAELPHSVFHGHKQLATKIRLWHQQGERCLYTGKTISIHDLINNPNQFEVDHILPLSITFDDSLANKVLVYATANQEKGQRTPYQALDSMDDAWSFRELKAFVRESKTLSNKKKEYLLTEEDISKFDVRKKFIERNLVDTRYASRVVLNALQEHFRAHKIDTKVSVVRGQFTSQLRRHWGIEKTRDTYHHHAVDALIIAASSQLNLWKKQKNTLVSYSEEQLLDIETGELISDDEYKESVFKAPYQHFVDTLKSKEFEDSILFSYQVDSKFNRKISDATIYATRQAKVGKDKKDETYVLGKIKDIYTQDGYDAFMKIYKKDKSKFLMYRHDPQTFEKVIEPILENYPNKEMNEKGKEVPCNPFLKYKEEHGYIRKYSKKGNGPEIKSLKYYDSKLLGNPIDITPENSKNKVVLQSLKPWRTDVYFNKNTGKYEILGLKYADLQFEKKTGTYKISQEKYNGIMKEEGVDSDSEFKFTLYKNDLLLVKDTETKEQQLFRFLSRTMPNVKYYVELKPYSKDKFEKNESLIEILGSADKSGRCIKGLGKSNISIYKVRTDVLGNQHIIKNEGDKPKLDF

SEQ ID NO: 19 - protein, 1128 aa, Streptococcus thermophilus
MSDLVLGLDIGIGSVGVGILNKVTGEIIHKNSRIFPAAQAENNLVRRTNRQGRRLTRRKKHRIVRLNRLFEESGLITDFTKISINLNPYQLRVKGLTDELSNEELFIALKNMVKHRGISYLDDASDDGNSSVGDYAQIVKENSKQLETKTPGQIQLERYQTYGQLRGDFTVEKDGKKHRLINVFPTSAYRSEALRILQTQQEFNPQITDEFINRYLEILTGKRKYYHGPGNEKSRTDYGRYRTSGETLDNIFGILIGKCTFYPEEFRAAKASYTAQEFNLLNDLNNLTVPTETKKLSKEQKNQIINYVKNEKAMGPAKLFKYIAKLLSCDVADIKGYRIDKSGKAEIHTFEAYRKMKTLETLDIEQMDRETLDKLAYVLTLNTEREGIQEALEHEFADGSFSQKQVDELVQFRKANSSIFGKGWHNFSVKLMMELIPELYETSEEQMTILTRLGKQKRLRLQIKQNISNKTKYIDEKLLTEEIYNPVVAKSVRQAIKIVNAAIKEYGDFDNIVIEMARETNEDDEKKAIQKIQKANKDEKDAAMLKAANQYNGKAELPHSVFHGHKQLATKIRLWHQQGERCLYTGKTISIHDLINNPNQFEVDHILPLSITFDDSLANKVLVYATANQEKGQRTPYQALDSMDDAWSFRELKAFVRESKTLSNKKKEYLLTEEDISKFDVRKKFIERNLVDTRYASRVVLNALQEHFRAHKIDTKVSVVRGQFTSQLRRHWGIEKTRDTYHHHAVDALIIAASSQLNLWKKQKNTLVSYSEEQLLDIETGELISDDEYKESVFKAPYQHFVDTLKSKEFEDSILFSYQVDSKFNRKISDATIYATRQAKVGKDKKDETYVLGKIKDIYTQDGYDAFMKIYKKDKSKFLMYRHDPQTFEKVIEPILENYPNKQMNEKGKEVPCNPFLKYKEEHGYIRKYSKKGNGPEIKSLKYYDSKLLGNPIDITPENSKNKVVLQSLKPWRTDVYFNKATGKYEILGLKYADLQFEKGTGTYKISQEKYNDIKKKEGVDSDSEFKFTLYKNDLLLVKDTETKEQQLFRFLSRTLPKQKHYVELKPYDKQKFEGGEALIKVLGNVANGGQCIKGLAKSNISIYKVRTDVLGNQHIIKNEGDKPKLDF

SEQ ID NO: 20 - protein, 1123 aa, Francisella tularensis
MNVKILPIAIDLDVKNTGVFSAFYQKGTSLEKLDNKNGKVYELSKDSYTLLMNNRTARRHKRRGIDRKQLVKRLFKLVWTEQLNLEWDKDTQQAISFLFNRRGFSFITDGYSTEYLNIVPEQVKAILMDIFDDYNGEDDLDSYLKLATEQESKISEIYNKLMQKILEFKLRKLCTDIKDDKVSTKTLKEITSYEFELLADYLANYSESLKTQKFSYTDKQGNLKELSYYHHDKYNIQEFLKRHATINDEILGTLLTDDFDIWNFNFEKFDFDKNEEKLQNQEDKDHTQAHLHHFVFVVNKIKSEMASGGRHRSQYFQEITNVLDENNHQEGYLKNFCENLHNKKYSNLSVKNLVNLVGNLSNLELKPLRKYFNDKIHAKADHWDEQKFTETYCHWILGEWRVGVKDQDKKDGAKYSYKDLCNELKQKVTKAGLIDFLLELDPCRTIPPYLDNNNRKPPKCQSLILNPKFLDNQYPNWQQYLQELKKLQSIQDYLDSFETDLKDLKSSKDQPYFVEYKSSNQQMASGQRDYKDLDARILQFIFDRVKASDELLLNEIYFQAKKLKQKASSELEKLESSKKLDEVIANSQLSQILKSQHTNGIFEQGTFLHLVCKYYKQRQRARDSRLYIMPEYRYDKKLDKYNNTGRFDDNNQLLTYCNHKPRQKRYQLLNDLAGVLQVSRNQLLSSVEEWFQQAQRVGEISKSQDEQIFEWLKSFKIASYCKAAVEMQKQYRGTLKNAIQTAIFRQSENINKNKNTGNQQQALSENSKDVKSLTADEKKLLKLIENIAKASQKIGESLGLNDKQIKKFNSIYSFAQIQQIAFAKRKGNANTCAVCSADNAHRMQQIKITELVEDNKDNIILSAKAQRLPAIPTRIVDGAVKKMATILAKNIVDDNWQNIKQVLSAKHQLHIPIITESNAFEFEPALADVKGKSLKDRRKKALERISPENIFKDKNNRIKEFAKGISAYSGANLTDGDFDGAKEELDHIIPRSHKKYGTLNDEANLICVTRDDNKNIFAIDTSKWFEIETPSDLRDIGVATIQYKIDNNSRPKVRVKLDYVIDDDSKINYFMNHSLLKSRYPDKVLEILKQSTIIEFESSGFNKTIKEMLGMTLAGIYNETSNN

SEQ ID NO: 21 - protein, 1436 aa, Bacteroides fragilis
MKRILGLDLGTNSIGWALVNEAENKDERSSIVKLGVRVNPLTVDELTNFEKGKSITTNADRTLKRGMRRNLQRYKLRRETLTEVLKEHKLITEDTILSENGNRTTFETYRLRAKAVTEEISLEEFARVLLMINKKRGYKSSRKAKGVEEGTLIDGMDIARELYNNNLTPGELCLQLLDAGKKFLPDFYRSDLQNELDRIWEKQKEYYPEILTDVLKEELRGKKRDAVWAICAKYFVWKENYTEWNKEKGKTEQQEREHKLEGIYSKRKRDEAKRENLQWRVNGLKEKLSLEQLVIVFQEMNTQINNSSGYLGAISDRSKELYFNKQTVGQYQMEMLDKNPNASLRNMVFYRQDYLDEFNMLWEKQAVYHKELTEELKKEIRDIIIFYQRRLKSQKGLIGFCEFESRQIEVDIDGKKKIKTVGNRVISRSSPLFQEFKIWQILNNIEVTVVGKKRKRRKLKENYSALFEELNDAEQLELNGSRRLCQEEKELLAQELFIRDKMTKSEVLKLLFDNPQELDLNFKTIDGNKTGYALFQAYSKMIEMSGHEPVDFKKPVEKVVEYIKAVFDLLNWNTDILGFNSNEELDNQPYYKLWHLLYSFEGDNTPTGNGRLIQKMTELYGFEKEYATILANVSFQDDYGSLSAKAIHKILPHLKEGNRYDVACVYAGYRHSESSLTREEIANKVLKDRLMLLPKNSLHNPVVEKILNQMVNVINVIIDIYGKPDEIRVELARELKKNAKEREELTKSIAQTTKAHEEYKTLLQTEFGLTNVSRTDILRYKLYKELESCGYKTLYSNTYISREKLFSKEFDIEHIIPQARLFDDSFSNKTLEARSVNIEKGNKTAYDFVKEKFGESGADNSLEHYLNNIEDLFKSGKISKTKYNKLKMAEQDIPDGFIERDLRNTQYIAKKALSMLNEISHRVVATSGSVTDKLREDWQLIDVMKELNWEKYKALGLVEYFEDRDGRQIGRIKDWTKRNDHRHHAMDALTVAFTKDVFIQYFNNKNASLDPNANEHAIKNKYFQNGRAIAPMPLREFRAEAKKHLENTLISIKAKNKVITGNINKTRKKGGVNKNMQQTPRGQLHLETIYGSGKQYLTKEEKVNASFDMRKIGTVSKSAYRDALLKRLYENDNDPKKAFAGKNSLDKQPIWLDKEQMRKVPEKVKIVTLEAIYTIRKEISPDLKVDKVIDVGVRKILIDRLNEYGNDAKKAFSNLDKNPIWLNKEKGISIKRVTISGISNAQSLHVKKDKDGKPILDENGRNIPVDFVNTGNNHHVAVYYRPVIDKRGQLVVDEAGNPKYELEEVVVSFFEAVTRANLGLPIIDKDYKTTEGWQFLFSMKQNEYFVFPNEKTGFNPKEIDLLDVENYGLISPNLFRVQKFSLKNYVFRHHLETTIKDTSSILRGITWIDFRSSKGLDTIVKVRVNHIGQIVSVGEY

SEQ ID NO: 22 - protein, 1314 aa, Mycoplasma synoviae
MLRLYCANNLVLNNVQNLWKYLLLLIFDKKIIFLFKIKVILIRRYMENNNKEKIVIGFDLGVASVGWSIVNAETKEVIDLGVRLFSEPEKADYRRAKRTTRRLLRRKKFKREKFHKLILKNAEIFGLQSRNEILNVYKDQSSKYRNILKLKINALKEEIKPSELVWILRDYLQNRGYFYKNEKLTDEFVSNSFPSKKLHEHYEKYGFFRGSVKLDNKLDNKKDKAKEKDEEEESDAKKESEELIFSNKQWINEIVKVFENQSYLTESFKEEYLKLFNYVRPFNKGPGSKNSRTAYGVFSTDIDPETNKFKDYSNIWDKTIGKCSLFEEEIRAPKNLPSALIFNLQNEICTIKNEFTEFKNWWLNAEQKSEILKFVFTELFNWKDKKYSDKKFNKNLQDKIKKYLLNFALENFNLNEEILKNRDLENDTVLGLKGVKYYEKSNATADAALEFSSLKPLYVFIKFLKEKKLDLNYLLGLENTEILYFLDSIYLAISYSSDLKERNEWFKKLLKELYPKIKNNNLEIIENVEDIFEITDQEKFESFSKTHSLSREAFNHIIPLLLSNNEGKNYESLKHSNEELKKRTEKAELKAQQNQKYLKDNFLKEALVPLSVKTSVLQAIKIFNQIIKNFGKKYEISQVVIEMARELTKPNLEKLLNNATNSNIKILKEKLDQTEKFDDFTKKKFIDKIENSVVFRNKLFLWFEQDRKDPYTQLDIKINEIEDETEIDHVIPYSKSADDSWFNKLLVKKSTNQLKKNKTVWEYYQNESDPEAKWNKFVAWAKRIYLVQKSDKESKDNSEKNSIFKNKKPNLKFKNITKKLFDPYKDLGFLARNLNDTRYATKVFRDQLNNYSKHHSKDDENKLFKVVCMNGSITSFLRKSMWRKNEEQVYRFNFWKKDRDQFFHHAVDASIIAIFSLLTKTLYNKLRVYESYDVQRREDGVYLINKETGEVKKADKDYWKDQHNFLKIRENAIEIKNVLNNVDFQNQVRYSRKANTKLNTQLFNETLYGVKEFENNFYKLEKVNLFSRKDLRKFILEDLNEESEKNKKNENGSRKRILTEKYIVDEILQILENEEFKDSKSDINALNKYMDSLPSKFSEFFSQDFINKCKKENSLILTFDAIKHNDPKKVIKIKNLKFFREDATLKNKQAVHKDSKNQIKSFYESYKCVGFIWLKNKNDLEESIFVPINSRVIHFGDKDKDIFDFDSYNKEKLLNEINLKRPENKKFNSINEIEFVKFVKPGALLLNFENQQIYYISTLESSSLRAKIKLLNKMDKGKAVSMKKITNPDEYKIIEHVNPLGINLNWTKKLENNN

SEQ ID NO: 23 - protein, 1368 aa, Streptococcus pyogenes
MDKKYSIGLDIGTNSVGWAVITDDYKVPSKKFKVLGNTDRHSIKKNLIGALLFDSGETAEATRLKRTARRRYTRRKNRICYLQEIFSNEMAKVDDSFFHRLEESFLVEEDKKHERHPIFGNIVDEVAYHEKYPTIYHLRKKLVDSTDKADLRLIYLALAHMIKFRGHFLIEGDLNPDNSDVDKLFIQLVQTYNQLFEENPINASGVDAKAILSARLSKSRRLENLIAQLPGEKKNGLFGNLIALSLGLTPNFKSNFDLAEDAKLQLSKDTYDDDLDNLLAQIGDQYADLFLAAKNLSDAILLSDILRLNSEITKAPLSASMIKRYDEHHQDLTLLKALVRQQLPEKYKEIFFDQSKNGYAGYIDGGASQEEFYKFIKPILEKMDGTEELLAKLNREDLLRKQRTFDNGSIPHQIHLGELHAILRRQEDFYPFLKDNREKIEKILTFRIPYYVGPLARGNSRFAWMTRKSEETITPWNFEEVVDKGASAQSFIERMTNFDKNLPNEKVLPKHSLLYEYFTVYNELTKVKYVTEGMRKPAFLSGEQKKAIVDLLFKTNRKVTVKQLKEDYFKKIECFDSVEISGVEDRFNASLGTYHDLLKIIKDKDFLDNEENEDILEDIVLTLTLFEDREMIEERLKTYAHLFDDKVMKQLKRRRYTGWGRLSRKLINGIRDKQSGKTILDFLKSDGFANRNFMQLIHDDSLTFKEDIQKAQVSGQGDSLHEHIANLAGSPAIKKGILQTVKVVDELVKVMGRHKPENIVIEMARENQTTQKGQKNSRERMKRIEEGIKELGSQILKEHPVENTQLQNEKLYLYYLQNGRDMYVDQELDINRLSDYDVDHIVPQSFIKDDSIDNKVLTRSDKNRGKSNNVPSEEVVKKMKNYWRQLLNAKLITQRKFDNLTKAERGGLSELDKAGFIKRQLVETRQITKHVAQILDSRMNTKYDENDKLIREVKVITLKSKLVSDFRKDFQFYKVREINNYHHAHDAYLNAVVGTALIKKYPKLESEFVYGDYKVYDVRKMIAKSEQEIGKATAKYFFYSNIMNFFKTEITLANGEIRKRPLIETNGETGEIVWDKGRDFATVRKVLSMPQVNIVKKTEVQTGGFSKESILPKRNSDKLIARKKDWDPKKYGGFDSPTVAYSVLVVAKVEKGKSKKLKSVKELLGITIMERSSFEKNPIDFLEAKGYKEVRKDLIVKLPKYSLFELENGRKRMLASAGELQKGNELALPSKYVNFLYLASHYEKLKGSPEDNEQKQLFVEQHKHYLDEIIEQISEFSKRVILADANLDKVLSAYNKHRDKPIREQAENIIHLFTLTNLGAPAAFKYFDTTIDRKRYTSTKEVLDATFIHQSITGLYETRIDLSQLGGD

SEQ ID NO: 24 - protein, 1368 aa, Streptococcus pyogenes
MDKKYSIGLDIGTNSVGWAVITDDYKVPSKKFKVLGNTDRHSIKKNLIGALLFDSGETAEATRLKRTARRRYTRRKNRICYLQEIFSNEMAKVDDSFFHRLEESFLVEEDKKHERHPIFGNIVDEVAYHEKYPTIYHLRKKLVDSTDKADLRLIYLALAHMIKFRGHFLIEGDLNPDNSDVDKLFIQLVQTYNQLFEENPINASGVDAKAILSARLSKSRRLENLIAQLPGEKKNGLFGNLIALSLGLTPNFKSNFDLAEDAKLQLSKDTYDDDLDNLLAQIGDQYADLFLAAKNLSDAILLSDILRVNTEITKAPLSASMIKRYDEHHQDLTLLKALVRQQLPEKYKEIFFDQSKNGYAGYIDGGASQEEFYKFIKPILEKMDGTEELLVKLNREDLLRKQRTFDNGSIPHQIHLGELHAILRRQEDFYPFLKDNREKIEKILTFRIPYYVGPLARGNSRFAWMTRKSEETITPWNFEEVVDKGASAQSFIERMTNFDKNLPNEKVLPKHSLLYEYFTVYNELTKVKYVTEGMRKPAFLSGEQKKAIVDLLFKTNRKVTVKQLKEDYFKKIECFDSVEISGVEDRFNASLGTYHDLLKIIKDKDFLDNEENEDILEDIVLTLTLFEDREMIEERLKTYAHLFDDKVMKQLKRRRYTGWGRLSRKLINGIRDKQSGKTILDFLKSDGFANRNFMQLIHDDSLTFKEDIQKAQVSGQGDSLHEHIANLAGSPAIKKGILQTVKVVDELVKVMGRHKPENIVIEMARENQTTQKGQKNSRERMKRIEEGIKELGSQILKEHPVENTQLQNEKLYLYYLQNGRDMYVDQELDINRLSDYDVDHIVPQSFLKDDSIDNKVLTRSDKNRGKSDNVPSEEVVKKMKNYWRQLLNAKLITQRKFDNLTKAERGGLSELDKAGFIKRQLVETRQITKHVAQILDSRMNTKYDENDKLIREVKVITLKSKLVSDFRKDFQFYKVREINNYHHAHDAYLNAVVGTALIKKYPKLESEFVYGDYKVYDVRKMIAKSEQEIGKATAKYFFYSNIMNFFKTEITLANGEIRKRPLIETNGETGEIVWDKGRDFATVRKVLSMPQVNIVKKTEVQTGGFSKESILPKRNSDKLIARKKDWDPKKYGGFDSPTVAYSVLVVAKVEKGKSKKLKSVKELLGITIMERSSFEKNPIDFLEAKGYKEVKKDLIIKLPKYSLFELENGRKRMLASAGELQKGNELALPSKYVNFLYLASHYEKLKGSPEDNEQKQLFVEQHKHYLDEIIEQISEFSKRVILADANLDKVLSAYNKHRDKPIREQAENIIHLFTLTNLGAPAAFKYFDTTIDRKRYTSTKEVLDATLIHQSITGLYETRIDLSQLGGD

SEQ ID NO: 25 - protein, 1370 aa, Streptococcus agalactiae; identical to SEQ ID NO: 5

SEQ ID NO: 26 - protein, 1173 aa, Rhodospirillum rubrum
MRPIEPWILGLDIGTDSLGWAVFSCEEKGPPTAKELLGGGVRLFDSGRDAKDHTSRQAERGAFRRARRQTRTWPWRRDRLIALFQAAGLTPPAAETRQIALALRREAVSRPLAPDALWAALLHLAHHRGFRSNRIDKRERAAAKALAKAKPAKATAKATAPAKEADDEAGFWEGAEAALRQRMAASGAPTVGALLADDLDRGQPVRMRYNQSDRDGVVAPTRALIAEELAEIVARQSSAYPGLDWPAVTRLVLDQRPLRSKGAGPCAFLPGEDRALRALPTVQDFIIRQTLANLRLPSTSADEPRPLTDEEHAKALALLSTARFVEWPALRRALGLKRGVKFTAETERNGAKQAARGTAGNLTEAILAPLIPGWSGWDLDRKDRVFSDLWAARQDRSALLALIGDPRGPTRVTEDETAEAVADAIQIVLPTGRASLSAKAARAIAQAMAPGIGYDEAVTLALGLHHSHRPRQERLARLPYYAAALPDVGLDGDPVGPPPAEDDGAAAEAYYGRIGNISVHIALNETRKIVNALLHRHGPILRLVMVETTRELKAGADERKRMIAEQAERERENAEIDVELRKSDRWMANARERRQRVRLARRQNNLCPYTSTPIGHADLLGDAYDIDHVIPLARGGRDSLDNMVLCQSDANKTKGDKTPWEAFHDKPGWIAQRDDFLARLDPQTAKALAWRFADDAGERVARKSAEDEDQGFLPRQLTDTGYIARVALRYLSLVTNEPNAVVATNGRLTGLLRLAWDITPGPAPRDLLPTPRDALRDDTAARRFLDGLTPPPLAKAVEGAVQARLAALGRSRVADAGLADALGLTLASLGGGGKNRADHRHHFIDAAMIAVTTRGLINQINQASGAGRILDLRKWPRTNFEPPYPTFRAEVMKQWDHIHPSIRPAHRDGGSLHAATVFGVRNRPDARVLVQRKPVEKLFLDANAKPLPADKIAEIIDGFASPRMAKRFKALLARYQAAHPEVPPALAALAVARDPAFGPRGMTANTVIAGRSDGDGEDAGLITPFRANPKAAVRTMGNAVYEVWEIQVKGRPRWTHRVLTRFDRTQPAPPPPPENARLVMRLRRGDLVYWPLESGDRLFLVKKMAVDGRLALWPARLATGKATALYAQLSCPNINLNGDQGYCVQSAEGIRKEKIRTTSCTALGRLRLSKKAT

SEQ ID NO: 27 - protein, 997 aa, Maritimibacter alkaliphilus
MKVLVDAGLMPSDPAAAKALETLDPYELRATGLDVMLPLTHLGRAVFHLNQRRGFKSNRKTDRGDNESGKIKDATKRLTWAMQEAGARTYGEFLHMRRARASDPRQVPSVRTRLSVASRGGPDSKEEAGYDFYPERAHLEDEFHALWSAQAAFHPDLTCELRDVVFEKIFYQRPLKEPKVGLCLFTAEERLPKAHPLTGRRVLYETVNQLRVTADGRTTRPLTLEERDMIVYALDNKKPVKSLSSMHLKLVALGKLVKLKDGERFTLESGVRDAIACDPIRATMGHPDGFGPAWSRLDWQAQWALIEKLRQVQSDDDFASLVAWLGATHNLSEDHAKRVANLHLPEGYGRLGLTATEAILCNLKAEVCTYSQAVERWGKHHSNQRTGECLEALPYYGEVLDRHVIPGTYNEDDDDVTRYGRITNPTVHIGLNQLRRLVNRIIATYGKPDQIVVELARELKQSEAQKSEALKKIRDTTADAIRRGRQLEEIGQKNTGANRLLLRLWEDLGPAVGPRCCPYTGKPISVTMLFDGACDVDHILPYSRTLDDSFANRTICLREANRQKGDRTPWEAWGGSDQWDAIEANLKDLPENKRKRFAPDAMERFEGERDFLDRALVDTQYLARISRAYLDTLFTEGGHVWVVPGRMTEMLRRHWGLNALLSDKDRGAGKVKNRTDHRHHAIDAAVIAATDHSLVNRISKAAGQGESAGQSAELIARDTPEPWEGFRNDISAQIARIVVSHRADHGRIDVEGRKHGKDSTAGRLHNDTAYGIVDDHTVVSRTPLLSLKPGDIEVTTKGKNIRDTQLQKALSVATTGKDGKGFEEALRNFAEKEGPYQGIRRVRLIETLQSSARVEVGSDEDGQPLKAYKGDSNHCYDLWKLPDGKVVPHVVSTYEAHAGTDKRPHPAAKRILRVFKKDMVAIEQDDQTAIFYVQKLDRANGLFLAPHLEANADARHRNPNDAFKFLQMGAGSVVRNKLRRVYVDEIGRIKDPGPPKH

SEQ ID NO: 28 - protein, 1027 aa, Blastopirellula marina
MFSESGDQPSLVDCGVRIFPEGVERDQQGGEKSKSQSRRVARGIRRQVRRRAQRLRHLKHALITTGLFPADVVDQQEVLASNPYELRSRALSEKLEPYEIGRILLHLAKRRGFLSNRTTDRSGGNELKGILAEMTQLQGEIAAHGCQTLGQYLHQLGDDGETFAQRLRGRHTLRAMYEDEFEKIWERQASYYPALLTEELRGGEEGKQSYPLVPTARRKSESLLKRFGLHGLLFFQRKMYWPKSVIGRCDLEPKEKRCPKADRLAQRFRILQEVNNLRLISPADRKEYTFAEFVGAGADKKLVDYLCEAKERTFPQIRKKFKLPETISFNYERGERSKLQGHETDAHFNGKKGLGKRRWSEIAEDVKDHIIQIVLEEDREDVALRKLTQDCSLTVEEAHKAMALHLPAGYSQYSRVAISRLLPHLELGKLLMGNDASDSAMHAAGYLRPDEREVRQYDLLPEPPDIPNPLVRQALYEVRKVINAIIREYGALGTIRVELAREAKKSAEQRTQIRIANAKRERENAAIAKTLQEMSPAIRPTRRNIQRYLLWKDQGGVCIYTGKVISQAQLFDSGEVDVDHILPRWRSLDDSMANKVIAHRSANNEKGDRTPWEWLGHDKPRFDELLLRAQRLPYGKRQRFIQKEVELTNFVERQLRDTTYVSRLVVQYLKGLGVPITTVKGPMTAELRHHWGLNALLNEDGSQKKNRSDHRHHAIDAIVIGLTDAKRLHALANARGKDLQPPWSEFRSDVATALGRMAVSHRVRRRIQGALHEETIYGPTQKAAQPTSTDQRPWAKDWIEDSQIVVRRKSVSDLTNTKHLAKIRDVTIRKILEDHLRRQKVDPTKPGVIPKDAFAGSNAPQMPSGVPIKKVRLVERGETWRKIGSGEASKFIKPGSNHHISYFAISRKGRESWKAHVTIMLDAACIAKESINNGKIVNRSIGDQGRFLMSLSIGEMFEITNNGGEILLCVVRKIDQSGRIYYKIHDDARESMDLKKDNLYMSPSKMQQFDARKVTVTPLGKIRNAND

SEQ ID NO: 29 - protein, 158 aa, Francisella tularensis
MIDFLLELDPCITIPPYLDNNNRKPPKCQSLILNPKFLDNQYPNWQQYLQELKKLQSIQDYLDSFETDLKDLKSSKDQPYFVEYKSSNQQMASGQRDYKDLDARILQFIFDRVKASDELLLSEIYFQAKKLKQKASSELEKLESSKKLDEVIANSQLS

SEQ ID NO: 30 - protein, 393 aa, Francisella tularensis
MNVKILPIAIDLDVKNTGVFSAFYQKGTSLEKLDNKNGKVYELSKDSYTLLMNNRTAQRHQRRGIDRKQLVKRLFKLVWTEQLNLEWDKDTQQAISFLFNRRGFSFITDGYSTEYLNIVPEQVKAILMDIFDDYNGEDDLDSYLKLATEQESKISEIYNKLMQKILEFKLRKLCTDIKDDKVSTKTLKEITSYEFELLADYLANYSESLKTQKFSYTDKQGNLKELSYYHHDKYNIQEFLKRHATINDEILDTLLTDDFDIWNFNFEKFDFDKNEEKLQSQEDKDHTQAYFHHFVFAVNKIKSEMASGGRHRSQYFQEITNVLDENNHQEGYLKNFCENLHNKKYSNLSVKNLVNLVGNLSNLELKPLRKYFNDKNLIIGMSKSLQKLIATGY

SEQ ID NO: 31 - protein, 1066 aa, Rhodopseudomonas palustris
MSERVVRRILGIDLGIASCGWGVVDISGAGGGIIATGVRCFDAPLIDKTGEPKSATRRTARGQRRIVRRRRQRMNGVRRLLCEFGLLPDPRPDALNQAMRRISTASAAAQVTPWTLRAAAHQRLLSNEELAVVLGHIARHRGFRSNAKNEAGANAADETSKMKKAMEATREGLAKYHAFGDMIANDPKFANRKRNRDKDYSHTAKRSDLEDEVRAILRAQLRFGSAAATETLAQTFADVAFFQRPLQDSEDRVGDCPFEPGQKRAARRAPSFELFRFLSRLANLKLAVGRSPERRLTAEEIALAAKGFGETKKTITFKSLREALDLDPNARFSGIGKDKEASLDVVARTGGAAYGTKTLKDALGDAPWRSLSRTPETLDRIAEILSFREDITSIRNGLEDLGLDSLVVEALMQAAANGDFKEFTRAGHISARAARNIIPGLREGLVYSEACARVGYDHAARLSVPLDQVGSPVTRKALSEALKQVRAVAREYGPIDYFHIELARSVGKSAEERKQLTDGIEARNVEKAKRRKQAEEHLGRAPSDDELLRYELAKEQNFKCIYSGDAIDPAGVAANDTRYQVDHILPWSRFGDDSYLNKTLCTARSNQNKRGRTPFEWFEADKTDVEWMEYVARVENLQEVKGRKKRNYSIKDAAAIEDKFKARNLTDTQWATRLLADELSRMFPPRECERAICGRADGGNDGLTIVEERRVFTRPGAITSKLRRAWGLEGLKKQDGKRVEDDRHHAVDALVLAATTESLLQRLTVEVQRREREGRPDDIFHCAEPWRGFRADVRRTVYGSETMPGIFVSRAERRRARGKAHDATIKQIREIEGERLVFERKPVEKLTDKDLEKIPIPKPYGQVSDPKRLRDELVESLRAWIAAGKPKDRPPLSPKGDVIRKVRIQTNDKVSVEINGGTVDRGDMARVDVFRKKNKKAVWEYYVVPIYPHQIVALNDPPDRAVIAYAEDKDWKEIDSSYEFLWSLFGLSYVEISKANGECIDGYFRGLHRGTGAASVCKHISLGKDATVSGIGLKTLASFKKFTIDRLGRKFEIPREVRTWRGEACT

SEQ ID NO: 32 - protein, 1149 aa, Lactobacillus salivarius
MERYHIGLDIGTSSIGWAVIGDDFKIKRKKGKNLIGVRLFKEGDTAAERRGFRTQRRRLNRRKWRLKLLEEIFDPYMAEVDKYFFARLKESNLSPKDSNKKYLGSLLFPDISDSNFYDKYPTIYHLRRDLMEKDKKFDLREIYLAIHHIVKYRGNFLEKVPAKNYKNSGASIGFLLEEVNDLYGNIIGNEDVAILDNDKFEDVEKIILNDEIRNIDKQKNVGRLLVKDKKEKNIVTAFSKAIFGYKFNLEDLLLIESDEKNKLTFNDENIDDIFNELSHSLNDNQMDLLTKTREIYFKFKLNMIVPTGYTISESMIEKYEMHKAHLKMYKEFINTLNAKDRKILKNAYSDYINNEKAKAANAQENFYKTVKKTIKENDSDTAKKIIGLIDEGNFMPKQRTGENGVIPHQLHQIELDRIIENQAKYYPWLAEENPVEKNRKFAKYKLDELVTFRVPYYVGPLIDKTESNKNEKETKFAWMVRKAKGTITPWNFENLVDRTESANRFIKRMTSKDTYIIGEDVLPASSLLYEKYKVLNELNNIKVNKKKLDVEQKQHVYLDLFTTRKNVTKDDLATSLNCDVESITGLTDNKKFNSSLSSYIDLKAILGNIVDDYSKNEDLEKIIEYSTIFEDGNIYKEKLSEISWLTDEQIEKLSNIHFKGWGRLSKKLLTQITNENGERIIDTLWNTSNNFIQVISDESIQAKLAEINGEYANKYNLEDILDEAYTSPQNKKAIRQVMKVVEDIEKAMKCEPTSIAIEFTREKRKSKLTNTRYKKISETYEKITDELISEYELGKLQSELDSKVNNMRDRYYLYFMQLGRDMYTGEKMNIDELHQKYDIDHILPQSFIKDDSLNNRVLTSKSVNIKEKSDKTAADLYAAKMGDFWRKLRKQGLMTEQKYKNLLTRTDSINKYTKQSFIKRQLVETSQVVKLAANILQDKYRNTKIIEIRARLNSDLRKKYELIKNREVNDYHHAIDGYLTTFVGQYLYKVYPKLRSYFVYDDFKKLDSNYLKHMDKFNFIWKLEDKKAEDVYDKVNDEFVLNVPEMKEYIRKIYNYKYMLVSKEVTTKNGAFYDQTKYNAKTINLIPIKKDKPTNIYGGYKGKVSSYMMLVKIQKKKEVIYKFVGVPRLWTDELDRLIDTDEKKALLKK

SEQ ID NO: 33 - protein, 1064 aa, Rhodopseudomonas palustris
MSECVTRRILGIDLGIASCGWGVIEVGEASGSIIASGVRCFDAPLIDKTGEPKSATRRTARGQRRIIRRRRQRMNAVRRLLAEFGVLTGRSPDALHQALLRLSQSVAGSQVTPWTLRAAAHERKLTNDELAVVLGHIARHRGFRSNSKNDGGANAADETSKMKKAMETTREGLARYHSFGAMIASDPKFADRKRNRDKDYSHTAKRSDLEDEVRTIFRSQTRFGSLVASEKLSQAFADAAFFQRPLQDSEDMVGSCPFEPGQKRTARRAPSFELFRFLSRLANLKLTVGRAPERRLTPDEIALAAKGFGETKKSITFKSLREALDLDPNARFSGVAKEKESTLDVAARTGGAAYGTKTLKDALGDAPWRSLSRMPEKLDRIAEILSFREDMKAIRNGLEEVGLDGLVVDALMQATANGDFKDFTRAAHISALAARNIIPGLREGLVYSDACTRVGYDHAARPAVPLSQIGSPVTRKALSEALKQVRAVAREYGPIDYFHIELARSIGKSAEERKKLTDGIEARNVEKEKRRKEAAEHLGRAPSDDELLRYELAKEQNFKCIYSGDPIDPAGISANDTRYQVDHILPWSRFGDDSYVNKTLCTARSNQNKRGRTPFEWFDADKTEAEWMEYSARVEDLKEVKGRKKRNYSIKDAASVEDKFKARNLTDTQWATRLLADELKRMFPPRECERVVTVRADGGNDGLSIVEERRVFTRPGAITSKLRRAWGLEGLKKQDGKRVEDDRHHAVDALVLAATTESLLNRLTVEVQQREREGRQDDIFHCSQPWPGFRVDVQRTVYGSETMPGIFVSRAERRRARGKAHDATVKQIRDIDGERIVFERKPIEKLTDKDLERIPVPEPYGKAADPKKLRDELVENLRAWIAAGKPKDKPPRSPKGDIIRKVRIETKDKVAVEINGGTVDRGDMARVDVFRKKNKKGVWEFYVIPIYPHQIVASALPPNRAVIAYKAESEWTAIDGCFEFAWSLNPMSYLELVKSNGELIEGYFRSMDRTTGAINLSPMSTNSETIRSIGVKTLSSFRKFTVDRLGRKFEIPREVRTWRGEACT

SEQ ID NO: 34 - protein, 1166 aa, Nitrobacter hamburgensis
MHVEIDFPHFSRGDSHLAMNKNEILRGSSVLYRLGLDLGSNSLGWFVTHLEKRGDRHEPVALGPGGVRIFPDGRDPQSGTSNAVDRRMARGARKRRDRFVERRKELIAALIKYNLLPDDARERRALEVLDPYALRKTALTDTLPAHHVGRALFHLNQRRGFQSNRKTDSKQSEDGAIKQAASRLATDKGNETLGVFFADMHLRKSYEDRQTAIRAELVRLGKDHLTGNARKKIWAKVRKRLFGDEVLPRADAPHGVRARATITGTKASYDYYPTRDMLRDEFNAIWAGQSAHHATITDEARTEIEHIIFYQRPLKPAIVGKCTLDPATRPFKEDPEGYRAPWSHPLAQRFRILSEARNLEIRDTGKGSRRLTKEQSDLVVAALLANREVKFDKLRTLLKLPAEARFNLESDRRAALDGDQTAARLSDKKGFNKAWRGFPPERQIAIVARLEETEDENELIAWLEKECALDGAAAARVANTTLPDGHCRLGLRAIKKIVPIMQDGLDEDGVAGAGYHIAAKRAGYDHAKLPTGEQLGRLPYYGQWLQDAVVGSGDARDQKEKQYGQFPNPTVHIGLGQLRRVVNDLIDKYGPPTEISIEFTRALKLSEQQKAERQREQRRNQDKNKARAEELAKFGRPANPRNLLKMRLWEELAHDPLDRKCVYTGEQISIERLLSDEVDIDHILPVAMTLDDSPANKIICMRYANRHKRKQTPSEAFGSSPTLQGHRYNWDDIAARATGLPRNKRWRFDANAREEFDKRGGFLARQLNETGWLARLAKQYLGAVTDPNQIWVVPGRLTSMLRGKWGLNGLLPSDNYAGVQDKAEEFLASTDDMEFSGVKNRADHRHHAIDGLVTALTDRSLLWKMANAYDEEHEKFVIEPPWPTMRDDLKAALEKMVVSHKPDHGIEGKLHEDSAYGFVKPLDATGLKEEEAGNLVYRKAIESLNENEVDRIRDIQLRTIVRDHVNVEKTKGVALADALRQLQAPSDDYPQFKHGLRHVRILKKEKGDYLVPIANRASGVAYKAYSAGENFCVEVFETAGGKWDGEAVRRFDANKKNAGPKIAHAPQWRDANEGAKLVMRIHKGDLIRLDHEGRARIMVVHRLDAAAGRFKLADHNETGNLDKRHATNNDIDPFRWLMASYNTLKKLAAVPVRVDELGRVWRVMPN

SEQ ID NO: 35 - protein, 641 aa, Nitrobacter hamburgensis
MHKRNSRSYRLGLDLGSNSLGWFVTHLEKRGDRYEPVALDPGGVRIFPDGRDPQSGMSNAVDRRMARGARKRRDRFVDPYALRKAALTNALPAHRVGRAIFHLNQRRGFQSNRKTDRKQSEDGAIKQAASKLKARMHEEAAPTLGAFFADMHLRKSYDDQQTAIRAELVRLGKDHLTGNARKKVWAKVRKRLFGDEVLRPKDTSDGARARATTTGTKASYDFYPTRAMLLDEFNAIWAAQREHHLAMTDEAKAEIEHIIFYHRPLKPAIVGKCTLDPATRPFKEDPEGYRAPWSHPLAQRFRILSEARNLEIRETGKTSRRLTKDQSDLVVAALLANREVKFDKLRTLLKLPAEARFNLESDRRSTATRPPHGCRTRRASIRRGAGFLRNGRSRSSPDWKKPKTKTNCSHGSKWNAHLTAQRPRASPIRRCRTAIAGSACAQSKRSCRSCRTSSMRMALRAPAITSWPSVPATTIPVDTFQQGGNAFGRILSVVTIELFAITDRVDPVQEQDARCFALRIAECRSDGLQHFAEVSLGLPPRNAAQDQRHSAGLCQSSCVGRFVPGTPCRRTPRSTSLHGKEPSAHAFGSTARSRPQLPASPRPCMSFRDGTSSSPARMPETLDRCAISRSNRSSVCRAERL

SEQ ID NO: 36 - protein, 1368 aa, Streptococcus pyogenes
MDKKYSIGLDIGTNSVGWAVITDDYKVPSKKFKVLGNTDRHSIKKNLIGALLFDSGEIAEATRLKRTARRRYTRRKNRICYLQEIFSNEMAKVDDSFFHRLEESFLVEEDKKHERHPIFGNIVDEVAYHEKYPTIYHLRKKLVDSTDKADLRLIYLALAHMIKFRGHFLIEGDLNPDNSDVDKLFIQLVQTYNQLFEENPINASGVDAKAILSARLSKSRRLENLIAQLPGEKKNGLFGNLIALSLGLTPNFKSNFDLAEDAKLQLSKDTYDDDLDNLLAQIGDQYADLFLAAKNLSDAILLSDILRLNSEITKAPLSASMIKRYDEHHQDLTLLKALVRQQLPEKYKEIFFDQSKNGYAGYIDGGASQEEFYKFIKPILEKMDGTEELLAKLNREDLLRKQRTFDNGSIPHQIHLGELHAILRRQEDFYPFLKDNREKIEKILTFRIPYYVGPLARGNSRFAWMTRKSEETITPWNFEEVVDKGASAQSFIERMTNFDKNLPNEKVLPKHSLLYEYFTVYNELTKVKYVTEGMRKPAFLSGEQKKAIVDLLFKTNRKVTVKQLKEDYFKKIECFDSVEISGVEDRFNASLGTYHDLLKIIKDKDFLDNEENEDILEDIVLTLTLFEDREMIEERLKTYAHLFDDKVMKQLKRRRYTVWGRLSRKLINGIRDKQSGKTILDFLKSDGFANRNFMQLIHDDSLTFKEDIQKAQVSGQGDSLHEHIANLAGSPAIKKGILQTVKVVDELVKVMGRHKPENIVIEMARENQTTQKGQKNSRERMKRIEEGIKELGSQILKEHPVENTQLQNEKLYLYYLQNGRDMYVDQELDINRLSDYDVDHIVPQSFIKDDSIDNKVLTRSDKNRGKSDNVPSEEVVKKMKNYWRQLLNAKLITQRKFDNLTKAERGGLSELDKAGFIKRQLVETRQITKHVAQILDSRMNTKYDENDKLIREVKVITLKSKLVSDFRKDFQFYKVREINNYHHAHDAYLNAVVGTALIKKYPKLESEFVYGDYKVYDVRKMLAKSEQEIGKATAKYFFYSNIMNFFKTEITLANGEIRKRPLIETNGETGEIVWDKGRDFATVRKVLSMPQVNIVKKTEVQTGGFSKESILPKRNSDKLIARKKDWDPKKYGGFDSPTVAYSVLVVAKVEKGKSKKLKSVKELLGITIMERSSFEKNPIDFLEAKGYKEVRKDLIIKLPKYSLFELENGRKRMLASAGELQKGNELALPSKYVNFLYLASHYEKLKGSPEDNEQKQLFVEQHKHYLDEIIEQISEFSKRVILADANLDKVLSAYNKHRDKPIREQAENIIHLFTLTNLGAPTAFKYFDTTIDRKRYTSTKEVLDATFIHQSITGLYETRIDLSQLGGD

SEQ ID NO: 37 - protein, 1368 aa, Streptococcus pyogenes
MDKKYSIGLDIGTNSVGWAVITDDYKVPSKKFKVLGNTDRHSIKKNLIGALLFDSGETAEATRLKRTARRRYTRRKNRICYLQEIFSNEMAKVDDSFFHRLEESFLVEEDKKHERHPIFGNIVDEVAYHEKYPTIYHLRKKLVDSTDKADLRLIYLALAHMIKFRGHFLIEGDLNPDNSDVDKLFIQLVQTYNQLFEENPINASGVDAKAILSARLSKSRRLENLIAQLPGEKKNGLFGNLIALSLGLTPNFKSNFDLAEDAKLQLSKDTYDDDLDNLLAQIGDQYADLFLAAKNLSDAILLSDILRLNSEITKAPLSASMIKRYDEHHQDLTLLKALVRQQLPEKYKEIFFDQSKNGYAGYIDGGASQEEFYKFIKPILEKMDGTEELLAKLNREDLLRKQRTFDNGSIPHQIHLGELHAILRRQEDFYPFLKDNREKIEKILTFRIPYYVGPLARGNSRFAWMTRKSEETITPWNFEEVVDKGASAQSFIERMTNFDKNLPNEKVLPKHSLLYEYFTVYNELTKVKYVTEGMRKPAFLSGEQKKAIVDLLFKTNRKVTVKQLKEDYFKKIECFDSVEISGVEDRFNASLGTYHDLLKIIKDKDFLDNEENEDILEDIVLTLTLFEDREMIEERLKTYAHLFDDKVMKQLKRRRYTGWGRLSRKLINGIRDKQSGKTILDFLKSDGFANRNFMQLIHDDSLTFKEDIQKAQVSGQGDSLHEHIANLAGSPAIKKGILQTVKVVDELVKVMGRHKPENIVIEMARENQTTQKGQKNSRERMKRIEEGIKELGSQILKEHPVENTQLQNEKLYLYYLQNGRDMYVDQELDINRLSDYDVDHIVPQSFIKDDSIDNKVLTRSDKNRGKSDNVPSEEVVKKMKNYWRQLLNAKLITQRKFDNLTKAERGGLSELDKAGFIKRQLVETRQITKHVAQILDSRMNTKYDENDKLIREVKVITLKSKLVSDFRKDFQFYKVREINNYHHAHDAYLNAVVGTALIKKYPKLESEFVYGDYKVYDVRKMIAKSEQEIGKATAKYFFYSNIMNFFKTEITLANGEIRKRPLIETNGETGEIVWDKGRDFATVRKVLSMPQVNIVKKTEVQTGGFSKESILPKRNSDKLIARKKDWDPKKYGGFDSPTVAYSVLVVAKVEKGKSKKLKSVKELLGLTIMERSSFEKNPIDFLEAKGYKEVKKDLIIKLPKYSLFELENGRKRMLASAGELQKGNELALPSKYVNFLYLASHYEKLKGSPEDNEQKQLFVEQHKHYLDEIIEQISEFSKRVILADANLDKVLSAYNKHRDKPIREQAENIIHLFTLTNLGAPAAFKYFDTTIDRKRYTSTKEVLDATLIHQSITGLYETRIDLSQLGGD

SEQ ID NO: 38 - protein, 1368 aa, Streptococcus pyogenes
MDKKYSIGLDIGTNSVGWAVITDDYKVPSKKFKVLGNTDRHSIKKNLIGALLFDSGEIAEATRLKRTARRRYTRRKNRICYLQEIFSNEMAKVDDSFFHRLEESFLVEEDKKHERHPIFGNIVDEVAYHEKYPTIYHLRKKLVDSTDKADLRLIYLALAHMIKFRGHFLIEGDLNPDNSDVDKLFIQLVQTYNQLFEENPINASGVDAKAILSARLSKSRRLENLIAQLPGEKKNGLFGNLIALSLGLTPNFKSNFDLAEDAKLQLSKDTYDDDLDNLLAQIGDQYADLFLAAKNLSDAILLSDILRLNSEITKAPLSASMIKRYDEHHQDLTLLKALVRQQLPEKYKEIFFDQSKNGYAGYIDGGASQEEFYKFIKPILEKMDGTEELLAKLNREDLLRKQRTFDNGSIPHQIHLGELHAILRRQEDFYPFLKDNREKIEKILTFRIPYYVGPLARGNSRFAWMTRKSEETITPWNFEEVVDKGASAQSFIERMTNFDKNLPNEKVLPKHSLLYEYFTVYNELTKVKYVTEGMRKPAFLSGEQKKAIVDLLFKTNRKVTVKQLKEDYFKKIECFDSVEISGVEDRFNASLGTYHDLLKIIKDKDFLDNEENEDILEDIVLTLTLFEDREMIEERLKTYAHLFDDKVMKQLKRRRYTGWGRLSRKLINGIRDKQSGKTILDFLKSDGFANRNFMQLIHDDSLTFKEDIQKAQVSGQGDSLHEHIANLAGSPAIKKGILQTVKVVDELVKVMGRHKPENIVIEMARENQTTQKGQKNSRERMKRIEEGIKELGSQILKEHPVENTQLQNEKLYLYYLQNGRDMYVDQELDINRLSDYDVDHIVPQSFIKDDSIDNKVLTRSDKNRGKSDNVPSEEVVKKMKNYWRQLLNAKLITQRKFDNLTKAERGGLSELDKAGFIKRQLVETRQITKHVAQILDSRMNTKYDENDKLIREVKVITLKSKLVSDFRKDFQFYKVREINNYHHAHDAYLNAVVGTALIKKYPKLESEFVYGDYKVYDVRKMLAKSEQEIGKATAKYFFYSNIMNFFKTEITLANGEIRKRPLIETNGETGEIVWDKGRDFATVRKVLSMPQVNIVKKTEVQTGGFSKESILPKRNSDKLIARKKDWDPKKYGGFDSPTVAYSVLVVAKVEKGKSKKLKSVKELLGITIMERSSFEKNPIDFLEAKGYKEVRKDLIIKLPKYSLFELENGRKRMLASAGELQKGNELALPSKYVNFLYLASHYEKLKGSPEDNEQKQLFVEQHKHYLDEIIEQISEFSKRVILADANLDKVLSAYNKHRDKPIREQAENIIHLFTLTNLGAPTAFKYFDTTIDRKRYTSTKEVLDATFIHQSITGLYETRIDLSQLGGD

SEQ ID NO: 39 - protein, 1371 aa, Streptococcus pyogenes
MDKKYSIGLDIGTNSVGWAVITDDYKVPSKKFKVLGNTDRHSIKKNLIGALLFDSGETAEATRLKRTARRRYTRRKNRICYLQEIFSNEMAKVDDSFFHRLEESFLVEEDKKHERHPIFGNIVDEVAYHEKYPTIYHLRKKLADSTDKADLRLIYLALAHMIKFRGHFLIEGDLNPDNSDVDKLFIQLVQTYNQLFEENPINASRVDAKAILSARLSKSRRLENLIAQLPGEKKNGLFGNLIALSLGLTPNFKSNFDLAEDAKLQLSKDTYDDDLDNLLAQIGDQYADLFLAAKNLSDATLLSDILRVNSEITKAPLSASMIKRYDEHHQDLTLLKALVRQQLPEKYKEIFFDQSKNGYAGYIDGGASQEEFYKFIKPILEKMDGTEELLAKLNREDLLRKQRTFDNGSIPHQIHLGELHAILRRQEDFYPFLKDNREKIEKILTFRIPYYVGPLARGNSRFAWMTRKSEETITPWNFEEVVDKGASAQSFIERMTNFDKNLPNEKVLPKHSLLYEYFTVYNELTKVKYVTEGMRKPAFLSGEQKKAIVDLLFKTNRKVTVKQLKEDYFKKIECFDSVEISGVEDRFNASLGTYHDLLKIIKDKDFLDNEENEDILEDIVLTLTLFEDKEMIEERLKTYAHLFDDKVMKQLKRRHYTGWGRLSRKLINGIRDKQSGKTILDFLKSDGFANRNFIQLIHDDSLTFKEAIQKAQVSGQGHSLHEQIANLAGSPAIKKGILQSVKVVDELVKVMGHKPENIVIEMARENQTTQKGQKNSRERMKRIEEGIKELGSQILKEHPVENTQLQNEKLYLYYLQNGRDMYVDQELDINRLSDYDVDHIVPQSFIKDDSIDNKVLTRSDKNRGKSDDVPSEEVVKKMKNYWRQLLNAKLITQRKFDNLTKAERGGLSELDKAGFIKRQLVETRQITKHVAQILDSRMNTKYDENDKLIREVKVITLKSKLVSDFRKDFQFYKVREINNYHHAHDAYLNAVVGTALIKKYPKLESEFVYGDYKVYDVRKMIAKSEQEIGKATAKRFFYSNIMNFFKTEITLANGEIRKRPLIETNEETGEIVWDKGRDFATVRKVLSMPQVNIVKKTEVQTGALTNESIYARGSFDKLISRKHRFESSKYGGFGSPTVTYSVLVVAKSKVQDGKVKKIKTGKELIGITLLDKLVFEKNPLKFIEDKGYGNVQIDKCIKLPKYSLFEFENGTRRMLASVMANNNSRGDLQKANEMFLPAKLVTLLYHAHKIESSKELEHEAYILDHYNDLYQLLSYIERFASLYVDVEKNISKVKELFSNIESYSISEICSSVINLLTLTASGAPADFKFLGTTIPRKRYGSPQSILSSTLIHQSITGLYETRIDLSQLGSD

SEQ ID NO: 40 - protein, 1121 aa, Streptococcus thermophilus
MSDLVLGLDIGIGSVGVGILNKVTGEIIHKNSRIFPAAQAENNLVRRTNRQGRRLARRKKHRRVRLNRLFEESGLITDFTKISINLNPYQLRVKGLTDELSNEELFIALKNMVKHRGISYLDDASDDGNSSVGDYAQIVKENSKQLETKTPGQIQLERYQTYGQLRGDFTVEKDGKKHRLINVFPTSAYRSEALRILQTQQEFNPQITDEFINRYLEILTGKRKYYHGPGNEKSRTDYGRYRTSGETLDNIFGILIGKCTFYPDEFRAAKASYTAQEFNLLNDLNNLTVPTETKKLSKEQKNQIINYVKNEKAMGPAKLFKYIAKLLSCDVADIKGYRIDKSGKAEIHTFEAYRKMKTLETLDIEQMDRETLDKLAYVLTLNTEREGIQEALEHEFADGSFSQKQVDELVQFRKANSSIFGKGWHNFSVKLMMELIPELYETSEEQMTILTRLGKQKTTSSSNKTKYIDEKLLTEEIYNPVVAKSVRQAIKIVNAAIKEYGDFDNIVIEMARETNEDDEKKAIQKIQKANKDEKDAAMLKAANQYNGKAELPHSVFHGHKQLATKIRLWHQQGERCLYTGKTISIHDLINNSNQFEVDHILPLSITFDDSLANKVLVYATANQEKGQRTPYQALDSMDDAWSFRELKAFVRESKTLSNKKKEYLLTEEDISKFDVRKKFIERNLVDTRYASRVVLNALQEHFRAHKIDTKVSVVRGQFTSQLRRHWGIEKTRDTYHHHAVDALIIAASSQLNLWKKQKNTLVSYSEDQLLDIETGELISDDEYKESVFKAPYQHFVDTLKSKEFEDSILFSYQVDSKFNRKISDATIYATRQAKVGKDKADETYVLGKIKDIYTQDGYDAFMKIYKKDKSKFLMYRHDPQTFEKVIEPILENYPNKQINEKGKEVPCNPFLKYKEEHGYIRKYSKKGNGPEIKSLKYYDSKLGNHIDITPKDSNNKVVLQSVSPWRADVYFNKTTGKYEILGLKYADLQFEKGTGTYKISQEKYNDIKKKEGVDSDSEFKFTLYKNDLLLVKDTETKEQQLFRFLSRTMPKQKHYVELKPYDKQKFEGGEALIKVLGNVANSGQCKKGLGKSNISIYKVRTDVLGNQHIIKNEGDKPKLDF

SEQ ID NO: 41 - protein, 1388 aa, Streptococcus thermophilus
MTKPYSIGLDIGTNSVGWAVTTDNYKVPSKKMKVLGNTSKKYIKKNLLGVLLFDSGITAEGRRLKRTARRRYTRRRNRILYLQEIFSTEMATLDDAFFQRLDDSFLVPDDKRDSKYPIFGNLVEEKAYHDEFPTIYHLRKYLADSTKKADLRLVYLALAHMIKYRGHFLIEGEFNSKNNDIQKNFQDFLDTYNAIFESDLSLENSKQLEEIVKDKISKLEKKDRILKLFPGEKNSGIFSEFLKLIVGNQADFRKCFNLDEKASLHFSKESYDEDLETLLGYIGDDYSDVFLKAKKLYDAILLSGFLTVTDNETEAPLSSAMIKRYNEHKEDLALLKEYIRNISLKTYNEVFKDDTKNGYAGYIDGKTNQEDFYVYLKKLLAEFEGADYFLEKIDREDFLRKQRTFDNGSIPYQIHLQEMRAILDKQAKFYPFLAKNKERIEKILTFRIPYYVGPLARGNSDFAWSIRKRNEKITPWNFEDVIDKESSAEAFINRMTSFDLYLPEEKVLPKHSLLYETFNVYNELTKVRFIAESMRDYQFLDSKQKKDIVRLYFKDKRKVTDKDIIEYLHAIYGYDGIELKGIEKQFNSSLSTYHDLLNIINDKEFLDDSSNEAIIEEIIHTLTIFEDREMIKQRLSKFENIFDKSVLKKLSRRHYTGWGKLSAKLINGIRDEKSGNTILDYLIDDGISNRNFMQLIHDDALSFKKKIQKAQIIGDEDKGNIKEVVKSLPGSPAIKKGILQSIKIVDELVKVMGGRKPESIVVEMARENQYTNQGKSNSQQRLKRLEKSLKELGSKILKENIPAKLSKIDNNALQNDRLYLYYLQNGKDMYTGDDLDIDRLSNYDIDHIIPQAFLKDNSIDNKVLVSSASNRGKSDDVPSLEVVKKRKTFWYQLLKSKLISQRKFDNLTKAERGGLSPEDKAGFIQRQLVETRQITKHVARLLDEKFNNKKDENNRAVRTVKIITLKSTLVSQFRKDFELYKVREINDFHHAHDAYLNAVVASALLKKYPKLEPEFVYGDYPKYNSFRERKSATEKVYFYSNIMNIFKKSISLADGRVIERPLIEVNEETGESVWNKESDLATVRRVLSYPQVNVVKKVEEQNHGLDRGKPKGLFNANLSSKPKPNSNENLVGAKEYLDPKKYGGYAGISNSFTVLVKGTIEKGAKKKITNVLEFQGISILDRINYRKDKLNFLLEKGYKDIELIIELPKYSLFELSDGSRRMLASILSTNNKRGEIHKGNQIFLSQKFVKLLYHAKRISNTINENHRKYVENHKKEFEELFYYILEFNENYVGAKKNGKLLNSAFQSWQNHSIDELCSSFIGPTGSERKGLFELTSRGSAADFEFLGVKIPRYRDYTPSSLLKDATLIHQSVTGLYETRIDLAKLGEG

SEQ ID NO: 42 - protein, 1138 aa, Acidothermus cellulolyticus
MGGSEVGTVPVTWRLGVDVGERSIGLAAVSYEEDKPKEILAAVSWIHDGGVGDERSGASRLALRGMARRARRLRRFRRARLRDLDMLLSELGWTPLPDKNVSPVDAWLARKRLAEEYVVDETERRRLLGYAVSHMARHRGWRNPWTTIKDLKNLPQPSDSWERTRESLEARYSVSLEPGTVGQWAGYLLQRAPGIRLNPTQQSAGRRAELSNATAFETRLRQEDVLWELRCIADVQGLPEDVVSNVIDAVFCQKRPSVPAERIGRDPLDPSQLRASRACLEFQEYRIVAAVANLRIRDGSGSRPLSLEERNAVIEALLAQTERSLTWSDIALEILKLPNESDLTSVPEEDGPSSLAYSQFAPFDETSARIAEFIAKNRRKIPTFAQWWQEQDRTSRSDLVAALADNSIAGEEEQELLVHLPDAELEALEGLALPSGRVAYSRLTLSGLTRVMRDDGVDVHNARKTCFGVDDNWRPPLPALHEATGHPVVDRNLAILRKFLSSATMRWGPPQSIVVELARGASESRERQAEEEAARRAHRKANDRIRAELRASGLSDPSPADLVRARLLELYDCHCMYCGAPISWENSELDHIVPRTDGGSNRHENLAITCGACNKEKGRRPFASWAETSNRVQLRDVIDRVQKLKYSGNMYWTRDEFSRYKKSVVARLKRRTSDPEVIQSIESTGYAAVALRDRLLSYGEKNGVAQVAVFRGGVTAEARRWLDISIERLFSRVAIFAQSTSTKRLDRRHHAVDAVVLTTLTPGVAKTLADARSRRVSAEFWRRPSDVNRHSTEEPQSPAYRQWKESCSGLGDLLISTAARDSIAVAAPLRLRPTGALHEETLRAFSEHTVGAAWKGAELRRIVEPEVYAAFLALTDPGGRFLKVSPSEDVLPADENRHIVLSDRVLGPRDRVKLFPDDRGSIRVRGGAAYIASFHHARVFRWGSSHSPSFALLRVSLADLAVAGLLRDGVDVFTAELPPWTPAWRYASIALVKAVESGDAKQVGWLVPGDELDFGPEGVTTAAGDLSMFLKYFPERHWVVTGFEDDKRINLKPAFLSAEQAEVLRTERSDRPDTLTEAGEILAQFFPRCWRATVAKVLCHPGLTVIRRTALGQPRWRRGHLPYSWRPWSADPWSGGTP

SEQ ID NO: 43 - protein, 1629 aa, Francisella novicida
MNFKILPIAIDLGVKNTGVFSAFYQKGTSLERLDNKNGKVYELSKDSYTLLMNNRTARRHQRRGIDRKQLVKRLFKLIWTEQLNLEWDKDTQQAISFLFNRRGFSFITDGYSPEYLNIVPEQVKAILMDIFDDYNGEDDLDSYLKLATEQESKISEIYNKLMQKILEFKLMKLCTDIKDDKVSTKTLKEITSYEFELLADYLANYSESLKTQKFSYTDKQGNLKELSYYHHDKYNIQEFLKRHATINDRILDTLLTDDLDIWNFNFEKFDFDKNEEKLQNQEDKDHIQAHLHHFVFAVNKIKSEMASGGRHRSQYFQEITNVLDENNHQEGYLKNFCENLHNKKYSNLSVKNLVNLIGNLSNLELKPLRKYFNDKIHAKADHWDEQKFTETYCHWILGEWRVGVKDQDKKDGAKYSYKDLCNELKQKVTKAGLVDFLLELDPCRTIPPYLDNNNRKPPKCQSLILNPKFLDNQYPNWQQYLQELKKLQSIQNYLDSFETDLKVLKSSKDQPYFVEYKSSNQQIASGQRDYKDLDARILQFIFDRVKASDELLLNEIYFQAKKLKQKASSELEKLESSKKLDEVIANSQLSQILKSQHTNGIFEQGTFLHLVCKYYKQRQRARDSRLYIMPEYRYDKKLHKYNNTGRFDDDNQLLTYCNHKPRQKRYQLLNDLAGVLQVSPNFLKDKIGSDDDLFISKWLVEHIRGFKKACEDSLKIQKDNRGLLNHKINIARNTKGKCEKEIFNLICKIEGSEDKKGNYKHGLAYELGVLLFGEPNEASKPEFDRKIKKFNSIYSFAQIQQIAFAERKGNANTCAVCSADNAHRMQQIKITEPVEDNKDKIILSAKAQRLPAIPTRIVDGAVKKMATILAKNIVDDNWQNIKQVLSAKHQLHIPIITESNAFEFEPALADVKGKSLKDRRKKALERISPENIFKDKNNRIKEFAKGISAYSGANLTDGDFDGAKEELDHIIPRSHKKYGTLNDEANLICVTRGDNKNKGNRIFCLRDLADNYKLKQFETTDDLEIEKKIADTIWDANKKDFKFGNYRSFINLTPQEQKAFRHALFLADENPIKQAVIRAINNRNRTFVNGTQRYFAEVLANNIYLRAKKENLNTDKISFDYFGIPTIGNGRGIAEIRQLYEKVDSDIQAYAKGDKPQASYSHLIDAMLAFCIAADEHRNDGSIGLEIDKNYSLYPLDKNTGEVFTKDIFSQIKITDNEFSDKKLVRKKAIEGFNTHRQMTRDGIYAENYLPILIHKELNEVRKGYTWKNSEEIKIFKGKKYDIQQLNNLVYCLKFVDKPISIDIQISTLEELRNILTTNNIAATAEYYYINLKTQKLHEYYIENYNTALGYKKYSKEMEFLRSLAYRSERVKIKSIDDVKQVLDKDSNFIIGKITLPFKKEWQRLYREWQNTTIKDDYEFLKSFFNVKSITKLHKKVRKDFSLPISTNEGKFLVKRKTWDNNFIYQILNDSDSRADGTKPFIPAFDISKNEIVEAIIDSFTSKNIFWLPKNIELQKVDNKNIFAIDTSKWFEVETPSDLRDIGIATIQYKIDNNSRPKVRVKLDYVIDDDSKINYFMNHSLLKSRYPDKVLEILKQSTIIEFESSGFNKTIKEMLGMKLAGIYNETSNN

SEQ ID NO: 44 - protein, 1068 aa, Verminephrobacter eiseniae
MNKAVAYRLALDLGSTSLGWAIFRLNEAREPTAIIRAGVRIFSDGRNANSEPLAVHRRVARAMRRRRDRLLKRKKRMHDQLVQHGFFPAEVAERKELERLNPYQLRAKGLHEALTPGEFARALFHINQRRGFKSNRKTDRKDNDSGALKQAISELRKRIQDSDCATAGEWFWKERMQQKPEGVRGQWVRARYRKTPSTTDEGKKRIGYDLYVDRAMVEQEFDALWAAQAALQPGLFTEAARAELKDTLLYQRDLRPVKPGRCTLLPAEERAPLALPSTQRFRILQEVNNLRLLDEALREVPLNLAQRDAVVSALEGKKELSFAAIRKLLTLSGKFNLEDEKRAELKGNATSVILARKDLFGDAWAGFDAAVQDEIVWRLVSQESEGALIAWLQQHTGVDGVCAEAIVNTRLPDGYGRLSRKALERIVPALQREVCTYDKAVQAAGFAHHSDLGFDFDYAEDEVQQVGEHTIASTGEVQAQYAFKQLPYYGKALQRHVAFGSGDAKDHEEKCYGKIANPTVHIGLNQVRTVVNALIRRYGHPTEVVVELARDLKQSREQKQQTQREQADNQKRNEDIRKRIAPILETSPERVRDRDIKKWILWEELNKKDIADRHCPYSGERISATMLLSEAVEIEHILPFSRTLDDSLNNRTVAMRRANRIKGDRTPWEARADFEAQGWRYEAILQRAEGMPPRKRYRFAEDGYQRWLGKDRNFLARALNDTSYLSRLAANYLRLVCPQGVRVIPGQMTDKLRGKFGLNSVLGLDGKKNRNDHRHHAVDACVIGVTDQGLMQRFANASKQARENGLTRLVQDMLLPWWPSYYDHVERAVRHIRVSHRPDHGFEGAMMKGTAHGIREDGIREDGRIKQRPKAKGSADHKTITLIPIDEPRQLARHGVDAEGKPLPYKGYASGSNYCIEITKNGKGKWEGQVISTFDAYRIKAAADAAARAGQVISTVEADSIVRKSGWERLRGAQSQNGQPLVMRLVIGDSVRMEVDGRDEVMRVVKMSGKEMVFAPVREANVDKRNNMPDEQDPFTYTYKRADQLRKAKARQVTISPIGELRDPGFKG

SEQ ID NO: 45 - protein, 1125 aa, Francisella tularensis
MNVKILPIAIDLDVKNTGVFSAFYQKGTSLEKLDNKNGKVYELSKDSYTLLMNNRTARRHQRRGIDRKQLVKRLFKLVWTEQLNLEWDKDTQQAISFLFNRRGFSFITDGYSTEYLNIVPEQVKAILMDIFDDYNGEDDLDSYLKLATEQESKISEIYNKLMQKILEFKLRKLCTDIKDDKVSTKTLKEITSYEFELLADYLANYSESLKIQKFSYTDKQGNLKELSYYHHDKYNIQEFLKRHATINDEILDTLLTDDFDIWNFNFEKFDFDKNEEKLQNQEDKDHTQAHLHHFVFAVNKIKSEMASGGRHRSQYFQEITNVLDENNHQEGYLKNFCENLHNKKYSNLSVKNLVNLVGNLSNLELKPLRKYFNDKIHAKADHWDEQKFTETYCHWILGEWRVGVKDQDKKDGAKYSYKDLCNELKQKVTKAGLIDFLLELDPCRTIPPYLDNNNRKPPKCQSLILNPKFLDNQYPNWQQYLQELKKLQSIQDYLDSFETDLKDLKSSKDQPYFVEYKSSNQQMASGQRDYKDLDARILQFIFDRVKASDELLLNEIYFQAKKLKQKASSELEKLESSKKLDEVIANSQLSQILKSQHTNGIFEQGTFLHLVCKYYKQRQRARDSRLYIMPEYRYDKKLDKYNNTGRFDDNNQLLTYCNHKPRQKRYQLLNDLAGVLQVSRNQLLSSVEEWFQQAQRVGEISKSQDEQIFEWLKSFKIASYCKAAVEMQKQYRGTLKNAIQTAIFRQSENINKNKNKNTGNQQQALSENSKDVKSLTADEKKLLKLIENIAKASQKIGESLGLNDKQIKKFNSIYSFAQIQQIAFAERKGNANTCAVCSADNAHRMQQIKITELVEDNKDNIILSAKAQRLPAIPTRIVDGAVKKMATILAKNIVDDNWQNIKQVLSAKHQLHIPIITESNAFEFEPALADVKGKSLKDRRKKALERISPENIFKDKNNRIKEFAKGISAYSGANLTDGDFDGAKEELDHIIPRSHKKYGTLNDEANLICVTRDDNKNIFAIDTSKWFEIETPSDLRDIGVATIQYKIDNNSRPKVRVKLDYVIDDDSKINYFMNHSLLKSRYPDKVLEILKQSTIIEFESSGFNKTIKEMLGMTLAGIYNETSNN

SEQ ID NO: 46 - protein, 1064 aa, Unknown
  Bradyrhizobium sp.BTAi1
MKRTSLRAYRLGVDLGANSLGWFVVWLDDHGQPEGLGPGGVRIFPDGRNPQSKQSNAAGRRLARSARRRRDRYLQRRGKLMGLLVKHGLMPADEPARKRLECLDPYGLRAKALDEVLPLHHVGRALFHLNQRRGLFANRAIEQGDKDASAIKAAAGRLQTSMQACGARTLGEFLNRRHQLRATVRARSPVGGDVQARYEFYPTRAMVDAEFEAIWAAQAPHHPTMTAEAHDTIREAIFSQRAMKRPSIGKCSLDPATSQDDVDGFRCAWSHPLAQRFRIWQDVRNLAVVETGPTSSRLGKEDQDKVARALLQTDQLSFDEIRGLLGLPSDARFNLESDRRDHLKGDATGAILSARRHFGPAWHDRSLDRQIDIVALLESALDEAAIIASLGTTHSLDEAAAQRALSALLPDGYCRLGLRAIKRVLPLMEAGRTYAEAASAAGYDHALLPGGKLSPTGYLPYYGQWLQNDVVGSDDERDTNERRWGRLPNPTVHIGIGQLRRVVNELIRWHGPPAEITVELTRDLKLSPRRLAELEREQAENQRKNDKRTSLLRKLGLPASTHNLLKLRLWDEQGDVASECPYTGEAIGLERLVSDDVDIDHLIPFSISWDDSAANKVVCMRYANREKGNRTPFEAFGHRQGRPYDWADIAERAARLPRGKRWRFGPGARAQFEELGDFQARLLNETSWLARVAKQYLAAVTHPHRIHVLPGRLTALLRATWELNDLLPGSDDRAAKSRKDHRHHAIDALVAALTDQALLRRMANAHDDTRRKIEVLLPWPTFRIDLETRLKAMLVSHKPDHGLQARLHEDTAYGTVEHPETEDGANLVYRKTFVDISEKEIDRIRDRRLRDLVRAHVAGERQQGKTLKAAVLSFAQRRDIAGHPNGIRHVRLTKSIKPDYLVPIRDKAGRIYKSYNAGENAFVDILQAESGRWIARATTVFQANQANESHDAPAAQPIMRVFKGDMLRIDHAGAEKFVKIVRLSPSNNLLYLVEHHQAGVFQTRHDDPEDSFRWLFASFDKLREWNAELVRIDTLGQPWRRKRGLETGSEDATRIGWTRPKKWP

SEQ ID NO: 47 - protein, 1354 aa, Flavobacterium psychrophilum
MKKILGLDLGTNSIGWAFINEAENEIEVSSIVNTGVRIVPLTTDEESDFKKGNTISINADRTLKRGARRGLQRFKQRREALLETFNRIKFIATDFVYAETGAATTFSSYQLRAKSAVEAVTKEELVKVLLMLNKKRGYKSSRKAKTAEEGDAIDGMKIAKEIFENNLTPGQWVYNSLSKGGKFIPDFYHSDLQKELEKIVRFQNQFHSEQINDKLLADIQGKSRTQTSQHFSKTLNIPLAENKGTREETKLQHYQWRNEALANELDMKILAFIITEINNQINQSSGYLGAISDRSKELYFNQETVGQYQYKQLQENVHAKLKNQVFYRQDYLDEFEKIWETQAKFHSELNEKLKAEIRDITIFYQRKLKSQKHLVSFCEFEKGHKAIPKSSPLFQEFRIWQNLNNVVVKNETTKEVFELSEELKQLIAEELQFKESMTDVQMLTFCELKKGTHTVNFKKIEGNRTNTSIYKAFEKILEVEGYEIDFSKMKPLEIKETVAPIFETLNINTVILDFDPTIQGNDFDKQPYYQLWHLLYSAEDDDKLKETLKTKFGFKENHLPFILNINLQADYGSLSAKAIKKILPHLMDGHIYDKACLMVGYNHSSSLTTAQNNDRVLKDTLELLKKNSLRNPVVEKILNQMINVINAIMKDPAMGKPDEIRVELARELKANNEQRKKATSDINTATTEHERIRKLLHSEFNIPRVTRNDIIRYKLWLETGGISLYTGNPIKASDLFSKNYDIEHIIPKSRLFDDSFSNKTLCERQLNIDKSNKTAYSFLQEKLSENDFAAYENRVKDLFKTGKIKSYTKYKKLLMADNEIPEGFIDRQLRETQYIAKKAKEILLEVSRNVTATIGSVTDKLRQDWELVDVMKELNWEKYDKLGLTHIEEGKNGERLSKIKDWTKRNDHRHHAMDAITVAFTKPAYIQYLNNLNAKTQGENKANSIIGIENKHLYRDKNNKLRFISPMKNFREEAKKQLESILISYKAKNKVVTKNKNTTKKSGGTNQKIQLTPRGRLHKETVYGKLQQYATKEEKVNASFTEDYIQKVAKKEYREALLKRLEENDNDPKKAFTGKNALNKTPIYISLKDNIIVPEKVKTVWLETDYTIRKDITPDLKIDKVIDVGIKRILQNRLNEFNGDPKKAFVNLGESPIWLNKEKGIAIKRVTISGVSNAQALHTKKDHLGNEILDKNGNPIPVDFISTGNNHHVAIYRDEKGNLQEEVVSFYDAVIRRNLGLSVINKNHEKGWEFLFSMKQNEFFIFPSDGFNPHEIDLLNPNNYHLISPNIFRVQKISTKNYMFNHHLETKAVDGEMLKSKKELSKTSYHFIQTPTNLNGIIKVRINHLGKIVHLGEY

SEQ ID NO: 48 - protein, 1062 aa, Actinobacillus succinogenes
MNLNYILGLDLGIASVGWAVVEIDEQENPQRLIDVGVRTFDRAEVLKTGESLALARRLARSSRRLVKRRAERIKKAKRLLKAENLLLSADEILPNEAWQLRVKGLDQKLERQEWAAVLLHLLKHRGYLSQRKNESKSENKELGALLSGVAINHQILQSAEYRTPAEIAVNKFQAEEGHIRNQRGAYTHTFSRLDLLAEMELLFQRQATLGNPHTSTKLLENLTALLMWQKPALAGEAILKMLGKCTFEPTEYKAAKNSYSAERFVWLTKLNNLRILEQGAERALTDNERFALLDQPYEKAKLTYAQVRTLLGLSDEAIFKGLRYQGEDKKAVETKTTLMEVKAYHQIRKALEGLDLKAEWNELKNNPALLDEIGTAFSLYKTDDDIHRYLDGKLSESVLNALLENLNFDKFIQLSLKALQQILPLMLQGQRYDEAVSAIYGDHYGKKSDEIDRLLPNIPTDEIRNPVVLRTLTQARKVINAVVRLYGSPARIHIETGREVGKSYQDRKKLEKQQEENRKQRENAVKKFKEYFPNFVGEPKGKDILKMRLYELQQAKCLYSGKSLELYRLLEKGYVEVDHALPFSRTWDDSFNNKVLVLANENQNKGNATPYEWLDGKNNSEGWQHFVARVQTSGFSYAKKQRVLIQELDEKSFIERNLNDTRYVARFLCNHIADNMLLTGKGKRKVFASNGQITALLRGCWGLQKVRENNDRHHALDAVVVACSTKSMQDKITKFVKYKEGRLFKDKKDGVYKGERINRETGEIISLHFPTPWKFFKENVEIRIFSENPKLELENRLPDYPQYNHEFVQPLFVSRMPTRKMTGQGHMETVKSAKRLDKGLSVLKVPLTQLKLSDLERMVNREREMALYEALKECLEQFGNDPAKAFAEPFYKKGGALVKAVRVEQTQKSGVLVRNGNGVADNATGSIVRVDVFTKGGKYFLVPIYTWQVAKGILPNKAVIQGKDESEWEEMDENAVFQFSMHKNDLIKVKTKKGEIFGYFNGLDRATGSIEIEEHDLEKSKGKNGSHRGLGVKTAFFLEKYQVDELGKNIRPCRPTKRQHVR

SEQ ID NO: 49 - protein, 1340 aa, Dorea longicatena
MEQEYYLGLDMGTGSVGWAVTDSEYHVLRKHGKALWGVRLFESASTAEERRMFRTSRRRLDRRNWRIEILQEIFAEEISKKDPGFFLRMKESKYYPEDKRDINGNCPELPYALFVDDDFTDKDYHKKFPTIYHLRKMLMNTEETPDIRLVYLAIHHMMKHRGHFLLSGDINEIKEFGTTFSKLLENIKNEELDWNLELGKEEYAVVESILKDNMLNRSTKKTRLIKALKAKSICEKAVLNLLAGGTVKLSDIFGLEELNETERPKISFADNGYDDYIGEVENELGEQFYIIETAKAVYDWAVLVEILGKYTSISEAKVATYEKHKSDLQFLKKIVRKYLTKEEYKDIFVSTSDKLKNYSAYIGMTKINGKKVDLQSKRCSKEEFYDFIKKNVLKKLEGQPEYEYLKEELERETFLPKQVNRDNGVIPYQIHLYELKKILGNLRDKIDLIKENEDKLVQLFEFRIPYYVGPLNKIDDGKEGKFTWAVRKSNEKIYPWNFENVVDIEASAEKFIRRMTNKCTYLMGEDVLPKDSLLYSKYMVLNELNNVKLDGEKLSVELKQRLYTDVFCKYRKVTVKKIKNYLKCEGIISGNVEITGIDGDFKASLTAYHDFKEILTGTELAKKDKENIITNIVLFGDDKKLLKKRLNRLYPQITPNQLKKICALSYTGWGRFSKKFLEEITAPDPETGEVWNIITALWESNNNLMQLLSNEYRFMEEVETYNMGKQTKTLSYETVENMYVSPSVKRQIWQTLKIVKELEKVMKESPKRVFIEMAREKQESKRTESRKKQLIDLYKACKNEEKDWVKELGDQEEQKLRSDKLYLYYTQKGRCMYSGEVIELKDLWDNTKYDIDHIYPQSKTMDDSLNNRVLVKKKYNATKSDKYPLNENIRHERKGFWKSLLDGGFISKEKYERLIRNTELSPEELAGFIERQIVETRQSTKAVAEILKQVFPESEIVYVKAGTVSRFRKDFELLKVREVNDLHHAKDAYLNIVVGNSYYVKFTKNASWFIKENPGRTYNLKKMFTSGWNIERNGEVAWEVGKKGTIVTVKQIMNKNNILVTRQVHEAKGGLFDQQIMKKGKGQIAIKETDERLASIEKYGGYNKAAGAYFMLVESKDKKGKTIRTIEFIPLYLKNKIESDESIALNFLEKGRGLKEPKILLKKIKIDTLFDVDGFKMWLSGRTGDRLLFKCANQLILDEKIIVTMKKIVKFIQRRQENRELKLSDKDGIDNEVLMEIYNTFVDKLENTVYRIRLSEQAKTLIDKQKEFERLSLEDKSSTLFEILHIFQCQSSAANLKMIGGPGKAGILVMNNNISKCNKISIINQSPTGIFENEIDLLKI

SEQ ID NO: 50 - protein, 984 aa, Campylobacter jejuni
MAKILAFDIGISSIGWAFSENDELKDCGVRIFTKAENPKTGESLALPRRIARSARKRLARRKARLNHLKHLIANEFKLNYEDYQSFDEILAKAYKGSLISPYELRFRALNELLSKQDFARVILHIAKRRGYDDIKNNGDEEKGKILKAIKQNEEKLANYQSVGEYLYKEYFQKFKENSKEFINVRNKKESYERCIAQSFLKDELKLIFKKQREFGFSFSKKFEEEVLSVAFYKRALKDFSHLVGNCSFFTDEKRAPKNSPLAFMFVALTRIINLLNNLKNTLYTKDDLNALLNEVLKNGTLTYKQTKKLLGLSDDYEFKGEKGNYFIEFKKYKEFIKALGEHSLSQDDLNEIAKDITLIKDEIKLKKALAKYDLNENQIDNLSKLEFKDHLNISFKALKLITPLMLEGKKYDEACNELTLKVAINEDKKDFLPAFNETYYKDEVTNPVVLRAIKEYRKVLNALLKKYGKVHKINIELAREVGKNHSQRAKIEKEQNENYKAKKDAELECEKLGLKINSKNILKLRLFKEQKEFCVYSGEKIKLSDLQDEKMLEIDHIYPYSRSFDDSYMNKVLVFTKQNQEKLNQTPFEAFGNDSAKWQKIEVLAKNLPTKKQKRILDKNYKDKEQKDFKDRNLNDTRYIARLVLNYTKDYLDFLPLSDDENTKLNDTQKGSKVHVEAKSGMLTSALRHTWGFSTKDRNNHLHHAIDAVIIAYANNSIVKAFSDFKKEQESNTAELYAKKISELDYKNKRKFFEPFSGFRQKVLDKIDEIFVSKPERKKPSGALHEETFRKEEEFYQSYGGKEGVLKALELGKIRKVNGKIVKNGDMFRVDIFKHKKTNKFYAVPIYTMDFALKVLPNKAVARSKKGEIKDWILMDENYEFCFSLYKDSLILIQTKDMQEPEFVYYNAFTSSTVSLIVSKHDNKFETLSKNQKILFKNANEKEVIAKSIGIQNLKVFEKYIVSALGEVTKAEFRQREEFKNELR

SEQ ID NO: 51 - protein, 1037 aa, Parvibaculum lavamentivorans
MERIFGFDIGTTSIGFSVIDYSSTQSAGNIQRLGVRIFPEARDPDGTPLNQQRRQKRMMRRQLRRRRIRRKALNETLHEAGFLPAYGSADWPVVMADEPYELRRRGLEEGLSAYEFGRAIYHLAQHRHFKGRELEESDTPDPDVDDEKEAANERAATLKALKNEQTTLGAWLARRPPSDRKRGIHAHRNVVAEEFERLWEVQSKFHPALKSEEMRARISDTIFAQRPVFWRKNTLGECRFMPGEPLCPKGSWLSQQRRMLEKLNNLAIAGGNARPLDAEERDAILSKLQQQASMSWPGVRSALKALYKQRGEPGAEKSLKFNLELGGESKLLGNALEAKLADMFGPDWPAHPRKQEIRHAVHERLWAADYGETPDKKRVIILSEKDRKAHREAAANSFVADFGITGEQAAQLQALKLPTGWEPYSIPALNLFLAELEKGERFGALVNGPDWEGWRRTNFPHRNQPTGEILDKLPSPASKEERERISQLRNPTVVRTQNELRKVVNNLIGLYGKPDRIRIEVGRDVGKSKREREEIQSGIRRNEKQRKKATEDLIKNGIANPSRDDVEKWILWKEGQERCPYTGDQIGFNALFREGRYEVEHIWPRSRSFDNSPRNKTLCRKDVNIEKGNRMPFEAFGHDEDRWSAIQIRLQGMVSAKGGTGMSPGKVKRFLAKTMPEDFAARQLNDTRYAAKQILAQLKRLWPDMGPEAPVKVEAVTGQVTAQLRKLWTLNNILADDGEKTRADHRHHAIDALTVACTHPGMTNKLSRYWQLRDDPRAEKPALTPPWDTIRADAEKAVSEIVVSHRVRKKVSGPLHKETTYGDTGTDIKTKSGTYRQFVTRKKIESLSKGELDEIRDPRIKEIVAAHVAGRGGDPKKAFPPYPCVSPGGPEIRKVRLTSKQQLNLMAQTGNGYADLGSNHHIAIYRLPDGKADFEIVSLFDASRRLAQRNPIVQRTRADGASFVMSLAAGEAIMIPEGSKKGIWIVQGVWASGQVVLERDTDADHSTTTRPMPNPILKDDAKKVSIDPIGRVRPSND

SEQ ID NO: 52 - protein, 1107 aa, Eubacterium ventriosum
MGYTVGLDIGVASVGVAVLDENDNIVEAVSNIFDEADTSNNKVRRTLREGRRTKRRQKTRIEDFKQLWETSGYIIPHKLHLNIIELRNKGLTELLSLDELYCVLLSMLKHRGISYLEDADDGEKGNAYKKGLAFNEKQLKEKMPCEIQLERMKKYGKYHGEFIIEINDEKEYQSNVFTTKAYKKELEKIFETQRCNGNKINTKFIKKYMEIYERKREYYIGPGNEKSRTDYGIYTTRTDEEGNFIDEKNIFGKLIGKCSVYPEEYRASSASYTAQEFNLLNDLNNLKINNEKLTEFQKKEIVEIIKDASSVNMRKIIKKVIDEDIEQYSGARIDKKGKEIYHTFEIYRKLKKELKTINVDIDSFTREELDKTMDILTLNTERESIVKAFDEQKFVYEENLIKKLIEFRKNNQRLFSGWHSFSYKAMLQLIPVMYKEPKEQMQLLTEMNVFKSKKEKYVNYKYIPENEVVKEIYNPVVVKSIRTTVKILNALIKKYGYPESVVIEMPRDKNSDDEKEKIDMNQKKNQEEYEKILNKIYDEKGIEITNKDYKKQKKLVLKLKLWNEQEGLCLYSGKKIAIEDLLNHPEFFEIDHIIPKSISLDDSRSNKVLVYKTENSIKENDTPYHYLTRINGKWGFDEYKANVLELRRRGKIDDKKVNNLLCMEDITKIDVVKGFINRNLNDTRYASRVVLNEMQSFFESRKYCNTKVKVIRGSLTYQMRQDLHLKKNREESYSHHAVDAMLIAFSQKGYEAYRKIQKDCYDFETGEILDKEKWNKYIDDDEFDDILYKERMNEIRKKIIEAEEKVKYNYKIDKKCNRGLCNQTIYGTREKDGKIHKISSYNIYDDKECNSLKKMINSGKGSDLLMYNNDPKTYRDMLKILETYSSEKNPFVAYNKETGDYFRKYSKNHNGPKVEKVKYYSGQINSCIDISHKYGHAKNSKKVVLVSLNPYRTDVYYDNDTGKYYLVGVKYNHIKCVGNKYVIDSETYNELLRKEGVLNSDENLEDLNSKNITYKFSLYKNDIIQYEKGGEYYTERFLSRIKEQKNLIETKPINKPNFQRKNKKGEWENTRNQIALAKTKYVGKLVTDVLGNCYIVNMEKFSLVVDK

SEQ ID NO: 53 - protein, 1136 aa, Streptococcus gordonii
MNGLVLGLDIGIASVGVGILEKDTGKIIHASSRLFPAATADNNVERRSNRQGRRLNRRKKHRSVRLQDLFEGYGLLTDFSKVSMNLNPYQLRVQGMENQLTNEELFVALKNIVKRRGISYLDDASEDGGTVSSDYGKAVEENRKLLAEKTPGQIQLERFEKYGQLRGDFTVEENGEKHRLINVFSTSAYRKEAERILRKQQEFNSKITDEFIEDYLIILTGKRKYYHGPGNEKSRTDYGRFRTDGTTLDNIFGILIGKCTFYTEEYRASKASYTAQEFNLLNDLNNLTVPTETKKLSEEQKKLIIEYAKSAKTLGASTLLKYIAKMIDASVDQIRGYRVDVNNKPEMHTFEVYRKMQSLETIKVEELPRKVLDELAHILTLNTEREGIEEAINSKLKDIFNRDQVLELVQFRKNNSSLFSKGWHNFSIKLMMELIPELYETSEEQMTILTRLGKQRSKETSKRTKYIDEKELTEEIYNPVVAKSVRQAIKIINEATKKYGIFDNIVIEMARENNEEDAKKDYIKRQKANQDEKNAAMEKAAFQYNGKKELPDNIFHGHKELTTKIRLWHQQGEKCLYTGKNIPISDLIHNQYKYEIDHILPLSLSFDDSLSNKVLVLATANQEKGQRTPFQALDSMDDAWSYREFKSYVKDSKLLSNKKKDYLLTEEDISKIEVKQKFIERNLVDTRYSSRVVLNALQDFYKSHQLDTTISVVRGQFTSQLRRKWGIEKSRETYHHHAVDALIIAASSQLRLWKKHSNPLIAYKEGQFVDSETGEIVSLSDEEYKELVFKAPYDHFVDTLRSKKFEDSILFSYQVDSKYNRKISDATIYATRKAKLDKEKKEYTYTLGKIKDIYALGTKTPSKTGFYKFLDLYKTDKSQFLMYQKDRKTWDEVIEKIIEQYRPFKEYDKNGKEVDFNPFEKYRIGNGPIRKYSKKGNGPEIKSLKYYDILLGKHKNITPDGSRNTVALLSLNPWRTDVYYNSETKKYEFLGLKYADLCFEEGGAYGISEVKYKKIREKEGIGKNSEFKFTLYKNDLILIKDTETNCQQFFRFWSRTGKDNPKSFEKHKIELKPYEKAKFEKGEELKVLGKVPPSSNQFQKNMQIENLSIYKVKTDILGNKHFIKKEGDEPKLKFKK

SEQ ID NO: 54 - protein, 984 aa, Campylobacter jejuni
MARILAFDIGISSIGWAFSENDELKDCGVRIFTKAENPKTGESLALPRRLARSARKRLARRKARLNHLKHLIANEFKLNYEDYQSFDESLAKAYKGSLISPYELRFRALNELLSKQDFARVILHIAKRRGYDDIKNNGDEEKSEILKAIKQNEEKLVNYQSVGEYLYKEYFQKFKENSKEFINVRNKKESYERCITQSFLKDELKLIFQKQREFGFSFSKKFEEEVLSVAFYKRALKDFSHLVGNCSFFTDEKRAPKNSPLAFMFVALTRIINILNNLKNTEGILYTKDDLNALLNEVLKNGTLTYKQTKKLLGLSDDYEFKGEKGTYFIEFKKYKEFIKALGEHNLSQDDLNEIAKDITLIKDEIKLKKALAKYDLNQNQIDSLSKLEFKDHLNISFKALKLITPLMLEGKKYDEACNELNLKVAINEDKKDFLPAFNETYYKDEVTNPVVLRAIKEYRKILNALLKKYGKVHKINIELAREVGKNHSQRAKIEKEQNENYKAKKDAEIECEKLGLKINSKNILKLRLFKEQKEFCAYSGEKIKLSDLQDEKMLEIDHIYPYSRSFDDSYMNKVLVFTKQNQEKLNKTPFEAFGNDSTKWQKIEVLAKNLPEKKQKRILDKNYKDKEQKDFKDRNLNDTRYIARLVLNYTKDYLDFLPLSDDENTKLNDTQKGSKVHVEAKSGMLTSALRHTWGFSAKDRNNHLHHAIDAAIIAYANNSIVKAFSDFKKEQESNSVELYAKKISELDYKNKRKFFEPFSGFRQKVLDKIDEIFVSKPERKKPSGALHEETFRKEEEFYQSYGGKEGVLKALELGKIRKVNGKIVKNGDMFRVDIFKHKKTNKFYAVPIYTMDFALKVLPNKAVARSKKGEIKDWILMDENYEFCFSLYKDSLILIQTKDMQEPELVYFNAFTSSTVSLIVSKHDNKFETLSKNQKILFKNANEKEVIAKSIGIQNLKVFEKYIVSALGEVTKAEFRQREDFKK

SEQ ID NO: 55 - protein, 1079 aa, Dinoroseobacter shibae
MRLGLDIGTSSIGWWLYETDGAGSDARITGVVDGGVRIFSDGRDPKSGASLAVDRRAARAMRRRRDRYLRRRATLMKVLAETGLMPADPAEAKALEALDPFALRAAGLDEPLPLPHLGRALFHLNQRRGFKSNRKTDRGDNESGKIKDATARLDMEMMANGARTYGEFLHKRRQKATDPRHVPSVRTRLSIANRGGPDGKEEAGYDFYPDRRHLEEEFHKLWAAQGAHHPELTETLRDLLFEKIFFQRPLKEPEVGLCLFSGHHGVPPKDPRLPKAHPLTQRRVLYETVNQLRVTADGREARPLTREERDQVIHALDNKKPTKSLSSMVLKLPALAKVLKLRDGERFTLETGVRDAIACDPLRASPAHPDRFGPRWSILDADAQWEVISRIRRVQSDAEHAALVDWLTEAHGLDRAHAEATAHAPLPDGYGRLGLTATTRILYQLTADVVTYADAVKACGWHHSDGRTGECFDRLPYYGEVLERHVIPGSYHPDDDDITRFGRITNPTVHIGLNQLRRLVNRIIETHGKPHQIVVELARDLKKSEEQKRADIKRIRDTTEAAKKRSEKLEELEIEDNGRNRMLLRLWEDLNPDDAMRRFCPYTGTRISAAMIFDGSCDVDHILPYSRTLDDSFPNRTLCLREANRQKRNQTPWQAWGDTPHWHAIAANLKNLPENKRWRFAPDAMTRFEGENGFLDRALKDTQYLARISRSYLDTLFTKGGHVWVVPGRFTEMLRRHWGLNSLLSDAGRGAVKAKNRTDHRHHAIDAAVIAATDPGLLNRISRAAGQGEAAGQSAELIARDTPPPWEGFRDDLRVRLDRIIVSHRADHGRIDHAARKQGRDSTAGQLHQETAYSIVDDIHVASRTDLLSLKPAQLLDEPGRSGQVRDPQLRKALRVATGGKTGKDFENALRYFASKPGPYQAIRRVRIIKPLQAQARVPVPAQDPIKAYQGGSNHLFEIWRLPDGEIEAQVITSFEAHTLEGEKRPHPAAKRLLRVHKGDMVALERDGRRVVGHVQKMDIANGLFIVPHNEANADTRNNDKSDPFKWIQIGARPAIASGIRRVSVDEIGRLRDGGTRPI

SEQ ID NO: 56 - protein, 1096 aa, Eubacterium dolichum
MMEVFMGRLVLGLDIGITSVGFGIIDLDESEIVDYGVRLFKEGTAAENETRRTKRGGRRLKRRRVTRREDMLHLLKQAGIISTSFHPLNNPYDVRVKGLNERLNGEELATALLHLCKHRGSSVETIEDDEAKAKEAGETKKVLSMNDQLLKSGKYVCEIQKERLRTNGHIRGHENNFKTRAYVDEAFQILSHQDLSNELKSAIITIISRKRMYYDGPGGPLSPTPYGRYTYFGQKEPIDLIEKMRGKCSLFPNEPRAPKLAYSAELFNLLNDLNNLSIEGEKLTSEQKAMILKIVHEKGKITPKQLAKEVGVSLEQIRGFRIDTKGSPLLSELTGYKMIREVLEKSNDEHLEDHVFYDEIAEILTKTKDIEGRKKQISELSSDLNEESVHQLAGLTKFTAYHSLSFKALRLINEEMLKTELNQMQSITLFGLKQNNELSVKGMKNIQADDTAILSPVAKRAQRETFKVVNRLREIYGEFDSIVVEMAREKNSEEQRKAIRERQKFFEMRNKQVADIIGDDRKINAKLREKLVLYQEQDGKTAYSLEPIDLKLLIDDPNAYEVDHIIPISISLDDSITNKVLVTHRENQEKGNLTPISAFVKGRFTKGSLAQYKAYCLKLKEKNIKTNKGYRKKVEQYLLNENDIYKYDIQKEFINRNLVDTSYASRVVLNTLTTYFKQNEIPTKVFTVKGSLTNAFRRKINLKKDRDEDYGHHAIDALIIASMPKMRLLSTIFSRYKIEDIYDESTGEVFSSGDDSMYYDDRYFAFIASLKAIKVRKFSHKIDTKPNRSVADETIYSTRVIDGKEKVVKKYKDIYDPKFTALAEDILNNAYQEKYLMALHDPQTFDQIVKVVNYYFEEMSKSEKYFTKDKKGRIKISGMNPLSLYRDEHGMLKKYSKKGDGPAITQMKYFDGVLGNHIDISAHYQVRDKKVVLQQISPYRTDFYYSKENGYKFVTIRYKDVRWSEKKKKYVIDQQDYAMKKAEKKIDDTYEFQFSMHRDELIGITKAEGEALIYPDETWHNFNFFFHAGETPEILKFTATNNDKSNKIEVKPIHCYCKMRLMPTISKKIVRIDKYATDVVGNLYKVKKNTLKFEFD

SEQ ID NO: 57 - protein, 1082 aa, Neisseria meningitidis
MAAFKPNPINYILGLDIGIASVGWAMVEIDEDENPICLIDLGVRVFERAEVPKTGDSLAMARRLARSVRRLTRRRAHRLLRARRLLKREGVLQAADFDENGLIKSLPNTPWQLRAAALDRKLTPLEWSAVLLHLIKHRGYLSQRKNEGETADKELGALLKGVADNAHALQTGDFRTPAELALNKFEKESGHIRNQRGDYSHTFSRKDLQAELNLLFEKQKEFGNPHISDGLKEGIETLLMTQRPALSGDAVQKMLGHCTFEPAEPKAAKNTYTAERFIWLTKLNNLRILEQGSERPLTDTERTTLIDEPYRKSKLTYAQARKLLELDNTAFFKGLRYGKDNAEASTLMEMKAYHAISRALEKEGLKDKKSPLNLSPELQDEIGTAFSLFKTDEDITGRLKDRVQPEILEALLKHISFDKFVQISLKALRRIVPLMEQGKRYDEACAEIYGDHYGKKNTEEKIDLPPIPADEIRNPVVLRALSQARKVINGVVRRYGSPARIHIETAREVGKSFKDRKEIEKRQEENRKDREKAATKFREYFPNFVGEPKSKDILKLRLYEQQHGKCLYSGKEINLGRLNEKGYVEIDHALPFSRTWDDSFNNKVLVLGSENQNKGNQTPYEYFNGKDNSREWQEFKARVETSRFPRSKKQRILLQKFDEEGFKERNLNDTRYVNRFLCQFVADHMLLTGKGKRRVFASNGQITNLLRGFWGLRKVRAENDRHHALDAVVVACSTVAMQQKITRFVRYKEMNAFDGKTIDKETGEVLHQKTHFPQPWEFFAQEVMIRVFGKPDGKPEFEEADTPEKLRTLLAEKLSSRPEAVHEYVTPLFVSRAPNRKMSGQGHMETVKSAKRLDEGVSVLRVPLTQLKLKDLEKMVNREREPKLYEALKARLEAHKDDPAKAFAEPFYKYDKAGNRTQQVKAVRVEQVQKTGVWVRNHNGIADNATMVRVDVFEKGDKYYLVPIYSWQVAKGILPDRAVVQGKDEEDWQLIDDSFNFKFSLHPNDLVEVITKKARMFGYFASCHRGTGNINIRIHDLDHKIGKNGILEGIGVKTALSFQKYQIDELGKEIRPCRLKKRPPVR

SEQ ID NO: 58 - protein, 1050 aa, Gluconacetobacter diazotrophicus
MGENMIDESLTFGIDLGIGSCGWAVLRRPSAFGRKGVIEGMGSWCFDVPETSKERTPTNQIRRSNRLLRRVIRRRRNRMAAIRRLLHAAGLLPSTDSDALKRPGHDPWELRARGLDKPLKPVEFAVVLGHIAKRRGFKSAAKRKATNISSDDKKMLTALEATRERLGRYRTVGEMFARDPDFASRRRNREGKYDRTTARDDLEHEVHALFAAQRRLGQGFASPELEEAFTASAFHQRPMQDSERLVGFCPFERTEKRAAKLTPSFERFRLLARLLNLRITTPDGERPLTVDEIALVTRDLGKTAKLSIKRVRTLIGLEDNQRFTTIRPEDEDRDIVARTGGAMTGTATLRKALGEALWTDMQERPEQLDAIVQVLSFFEANETITEKLREIGLTLAVLDVLLTALDAGVFAKFKGAAHISTKAARNLLPHLEQGRRYDEACTMAGYDHAASRLSHHGQIVAKTQFNALVTEIGESIANPIARKALIEGLKQIWAMRNHWGLPGSIHVELARDVGNSIEKRREIEKHIEKNTALRARERREVHDLLDLEDVNGDTLLRYRLWKEQGGKCLYTGKAIHIRQIAATDNSVQVDHILPWSRFGDDSFNNKTLCLASANQQKKRSTPYEWLSGQTGDAWNAFVQRIETNKELRGFKKRNYLLKNAKEAEEKFRSRNLNDTRYAARLFAEAVKLLYAFGERQEKGGNRRVFTRPGALTAALRQAWGVESLKKQDGKRINDDRHHALDALTVAAVDEAEIQRLTKSFHEWEQQGLGRPLRRVEPPWESFRADVEATYPEVFVARPERRRARGEGHAATIRQVKERECTPIVFERKAVSSLKEADLERIKDGERNEAIVEAIRSWIATGRPADAPPRSPRGDIITKIRLATTIKAAVPVRGGTAGRGEMVRADVFSKPNRRGKDEWYLVPVYPHQIMNRKAWPKPPMRSIVANKDEDEWTEVGPEHQFRFSLYPRSNIEIIRPSGEVIEGYFVGLHRNTGALTISAHNDPKSIHSGIGTKTLLAISKYQVDRFGRKSPVRKEVRTWHGEACISPTPPG

SEQ ID NO: 59 - protein, 1391 aa, Kordia algicida
MKKILGLDLGTNSIGWALVNEAEHEHEQSSIVKLGVRVNPLSVDEKTNFEKGRPLSINADRTSKRSARRNLQRFKLRRKNLINLLLKHHIISNETILTEVGKNTTHQTLKLRSKATQEKISLEEFARILLSINKKRGYKSSRKEKNEDEGFTIDGMAIAKELYDNQLTPGQYVYNILQDGKNYIPDFYRSDLQAEFDDVWQFQKKFYSSILTDEFYLKLKGQGKENTRKLFLAIHQVYTAENKGKRDAVKLQYYKWRSEAVKKQLSIEEVAYVLVEINNNINKSSGYLGAISDRSKALYFNNETVGEYLYGQLVKNRHNSLRNQVFYRQDYLDEFEKIWETQAKFYDELTNELKQEIRDVVIFYQRKLKSQKHLISDCLFEKHHKAIPKSSPLFQEFKIWQNLNYLEFVHTQSKEKIFFSELDDETRQFVFAELNIRGTLKIKEIKKLIGLETPVYWKSNFDEIEGNRTNQVLYNVYQNIADDLGYGFDWSKKHAFEINAELQAIFKDVGIDTAILNFDASIEENDFDKQKSYQLWHLLYSAEDTDKATEEDKLIYGNINTKLKKQLHQKYGFEAKYGNLLANISLQQDYGNLSAKAIKKILPYLESGNSFYEACTIVGYNPSNSLTKEQQQNRKLKDKLELLPKNSLRNPVVEKILNQKVNLINQLIDEYGKPDEVRIELARELKKSAKQRADLSKHINDATLKNQNIRKTLQKDFGIQNPSKNDVIRYKLYDELKDNGYKTLFTNKYIPKEQLFSKDVDIEHIIPKAILFDDSFSNKTLAYRNVNLAKADATAFDFISSKHLDDLDNYKARVETLFQSKRISKGKYKKLLMTRQNLPEDFIERDLRNSQYIAKKATAMLKEVFRSVVPTSGRITDKLREDWDLVNVMKELNLPKYRTLGLTEFIERKNGNKIEQIIDWTKRNDHRHHAMDALTVAFTTHNHIQYLNNLNVTHGLNGVDTDHEKSRLYAIKQAITKVYIVGKTKKRKFIPPMENFRSHAKNHLEGILISFKNKNKVVTKNKNRTKTKTKGVFNEKIQLTPRGQLHKETIYGHAKKVIVTKEKVSSKFTHEKILQVTKPAYREALLKRLASFKNDPKKAFSGKNALSKNPLYFDITSGKKVPDTVKLSYFENSYVIRKEVNSDNFKNEKSLQKVLDVGIRRILEKRLADYNGNAKEAFSNLEKNPIWKDKEKGVCIKKVRIEALKNAEPLHVKKDHLGKIILDDENKSTPVDFISTGNNHHVAIYEDKDGKLHDKVVSFYEVVSRVNLGLPIIDKSFNSHLDWKFLFSMKQNEMFVFPSEDFNPKEIDIGNPKNNELISKYLFRVQKFSKVTYGNSAVRDYVFRHHLETELIDKKELKGITYYQLKSIGMLEKLVKVRINHIGKIVHIGEY

SEQ ID NO: 60 - protein, 1116 aa, Clostridium spiroforme
MVEFLLKEMKIMGRLVLGLDIGITSVGYGVIDIDKNEFVDYGVRLFKEGTAINNEERRSKRGARRLKRRKTNRIADMKKLLERNGLIDEQYTALNNPYEIRKKGLKNKLSNYELATAILHITKNRGTCLESNADETQDEESTKNILSKNALELKDKYICEIQLARLEESGKIRGINNNFKTEDYLKELSKILENQDLEKETIDKIKEIVARRRRYDQGPGSEKSPTPYGSYRMENGELVHVNLIDMMRGKCSVFPDQLRAPQQSYSAELFNLLNDLNNLKINGEKLSSTEKQKIIDFVNEKGGITVKQLLKLIDVGITEISGFRIDKNEKPLITEFKGYKKVLKVFKNYNQESLLNDKSIVDTIMDINTKIKSIDERSDQLKQVLPSLDTSIINDLASIKGVSGYHSLSLKALNLINNEMLKTEMNQMQVLHQLDIFDKNRVSLKGQRQIYADDNAILSPVAKRAHRETFKVINKLRSIYGEFDSIVIETTRDKNTQDQKKRIKNNQKNYEERNTEVNNFLKEAGYNPENINAKTKMKIRLYIEQDAKSAYTLQDINLKELIEDEKAYEIDHIIPISISLDDSFNNKVLTTHDENQEKGNLTPISAFLKGKFHNGNLNTYKVFIQNNKNLNRKKKEYLLCEDDITRYEVVQNFINRNLVDTSYACRTVMNTLVHYFKDNEINTKVHTIKGQATSTFRKRIGLIKDREEDYFHHAIDALIVASLKKMNLINSYLMKVDFNEMYDEETGEIFNVLPDNSYLDEKYISFVSNLKNIYEESNKYIRGVMIKEKMTYPLIKVSHKIDTKPNRKISDDTIYSTRNVDNQDMLVERIKNIYDPKENAANTLINDIINDNTDKYIMYHKDPQTFDKIKAIVLNHFNEFKTDKNCYIVTKEGLYKLKGTSPLALYYEEFGPITKYAKKNNGPTIHSMKFYSEKLGNHLSITHKYSTVNKKVITKQISPYRTDFYQSPEGKYKFVTVRYKDVAYNAKKDKYIIDHSWYREQKKLKKIADEWIFVCSVHRDELIGIMKADGQKRIFDSSTESDGETLYHDAKTYEILKFTATNNDITGRFEVKPIYCYCKKQLMVSIGTCRKIQKFATDVLGNLYIVKDNVLKLEFK

SEQ ID NO: 61 - protein, 1348 aa, Finegoldia magna
MKSEKKYYIGLDVGTNSVGWAVTDEFYNILRAKGKDLWGVRLFEKADTAANTRIFRSGRRRNDRKGMRLQILREIFEDEIKKVDKDFYDRLDESKFWAEDKKVSGKYSLFNDKNFSDKQYFEKFPTIFHLRKYLMEEHGKVDIRYYFLAINQMMKRRGHFLIDGQISHVTDDKPLKEQLILLINDLLKIELEEELMDSIFEILADVNEKRTDKKNNLKELIKGQDFNKQEGNILNSIFESIVTGKAKIKNIISDEDILEKIKEDNKEDFVLTGDSYEENLQYFEEVLQENITLFNTLKSTYDFLILQSILKGKSTLSDAQVERYDEHKKDLEILKKVIKKYDEDGKLFKQVFKEDNGNGYVSYIGYYLNKNKKITAKKKISNIEFTKYVKGILEKQCDCEDEDVKYLLGKIEQENFLLKQISSINSVIPHQIHLFELDKILENLAKNYPSFNNKKEEFTKIEKIRKTFTFRIPYYVGPLNDYHKNNGGNAWIFRNKGEKIRPWNFEKIVDLHKSEEEFIKRMLNQCTYLPEETVLPKSSILYSEYMVLNELNNLRINGKPLDTDVKLKLIEELFKKKTKVTLKSIRDYMVRNNFADKEDFDNSEKNLEIASNMKSYIDFNNILEDKFDVEMVEDLIEKITIHTGNKKLLKKYIEETYPDLSSSQIQKIINLKYKDWGRLSRKLLDGIKGTKKETEKTDTVINFLRNSSDNLMQIIGSQNYSFNEYIDKLRKKYIPQEISYEVVENLYVSPSVKKMIWQVIRVTEEITKVMGYDPDKIFIEMAKSEEEKKTTISRKNKLLDLYKAIKKDERDSQYEKLLTGLNKLDDSDLRSRKLYLYYTQMGRDMYTGEKIDLDKLFDSTHYDKDHIIPQSMKKDDSIINNLVLVNKNANQTTKGNIYPVPSSIRNNPKIYNYWKYLMEKEFISKEKYNRLIRNTPLTNEELGGFINRQLVETRQSTKAIKELFEKFYQKSKIIPVKASLASDLRKDMNTLKSREVNDLHHAHDAFLNIVAGDVWNREFTSNPINYVKENREGDKVKYSLSKDFTRPRKSKGKVIWTPEKGRKLIVDTLNKPSVLISNESHVKKGELFNATIAGKKDYKKGKIYLPLKKDDRLQDVSKYGGYKAINGAFFFLVEHTKSKKRIRSIELFPLHLLSKFYEDKNTVLDYAINVLQLQDPKIIIDKINYRTEIIIDNFSYLISTKSNDGSITVKPNEQMYWRVDEISNLKKIENKYKKDAILTEEDRKIMESYIDKIYQQFKAGKYKNRRTTDTIIEKYEIIDLDTLDNKQLYQLLVAFISLSYKTSNNAVDFTVIGLGTECGKPRITNLPDNTYLVYKSITGIYEKRIRIK

SEQ ID NO: 62 - protein, 1129 aa, Streptococcus infantarius
MSNGKILGLDIGVASVGVGIIDSKTGNVIHANSRLFSAANAENNAERRGFRGARRLTRRKKHRVKRVRDLFEKYDISTDFRNLNLNPYELRVKGLTEQLTNEELFAALRTIAKRRGISYLDDAEDDSTGSSDYAKSIDENRRLLKTKTPGQIQLERLEKYGQLRGNFTVYDENGEAHRLINVFSTSDYKNEARKILETQSNYNKQITDEFIEDYIEILTQKRKYYHGPGNEKSRTDYGRFRTDGTTLENIFGILIGKCSFYPEEYRASKASYTAQEFNFLNDLNNLKVPTETGKLSTEQKEYLVDFAKKSKALGASKLLKEIAKIVDCSVDDIKGYRVDNKDKPDLHTFEPYRKLKFNLSSIDIDELSRETLDKLADILTLNTEREGIEDAIKRNLPSQFTEEQISEIVQIRKNQSSAFNKGWHSFSAKLMNELIPELYVTSEEQMTILTRLEKFKVNKKSSKNTKTIDEKEITDEIYNPVVAKSVRQTIKIINAAVKKYGDFDKIVIEMPRDKNAEDEKKFIDKKQKENKKEKDDSLKRAAFLYNGTDNLPDGVFHGNKELKTKIRLWYQQGERCLYSGKLISIHDLVHNSNKFEIDHILPLSLSFDDSLANKVLVYAWTNQEKGQKTPYQVIDSMDTAWSFREMKDYVLKQKGLGKKKCEYLLTTENIDKIEVKKKFIERNLVDTRYASRVVLNSLQTALKELGKDTKVSVVRGQFTSQLRRKWNIDKSRETYHHHAVDALIIAASSQLKLWQKQENPMFESYGENQVVNKETGEILSISDDKYKELVFQPPYQGFVNTISSKGFEDEILFSYQVDSKFNRKVSDATIYSTRKAKLGKDKKDETYVLGKIKDIYSQDGFDTFIKRYKKDKTQFLMYQKDPLTWENVIEVILRDYPSEKLSEDGKKTVKCNPFEEYRRENGLICKYSKKGNGTPIKSLKYYDKKLGNCIDITPEKSKNRVVLRQISPWRADIYFNLETLKYELMGLKYSDLSFEKGTGKYHISQEKYDAIREKEGIGKKSEFKFTLYRNDLILIKDTLNNCERMLRFGSKNDTSKHYVELKPLEKGTFDSEEEILPVLGKVAKSGQFIKGLNKPNISIYKVRTDVLGNKFFIKKEGDKPKLDFKNNNK

SEQ ID NO: 63 - protein, 1065 aa, Clostridium perfringens
MNKDINYALGLDIGITSVGWAVINLDLNRIEDLGVRIFNAAENLKDGSSLALPRRLARGRRRLLRRKAYRVERVRKLILKNNILTKEELEGLFKNKEVIDVWEARVKGLDYKLSREEWAKILINFCKRRGFKSNRKNEAKDKEAGQILSSISYNIEKMKETNSRTIGEYIYNEVKNSEDSYAPLRNKFGEYKMCVSRDVIREEIHTLFEKQRELGNNFASDEIEDKYFEIFNSQRPFSNFEDLEKLVGFCTFERKKHKRAPKHCISSEEFTLYEGINKLSIIKDGEKRKLSEEERTLVVNEAFNKKEIKYTTLRKLLGLSEEELFSTLTYSIDKDISKTENTKFVSLKGYHEIKRAIEKGVSKKAWQDIENNRNLLNDIAYVLTLGKTDDEIEKQLRLRNVPEELFESLLDMSFNKFNNLSIYALEKILPFMKEGYQYNEACEKAGYNFKAIYEGVRTKKLPVIEIDEIVNPVVNRALAQTRKVINSVIDKYGSPVRINIELARDLAKNFKDRKLIEKEQKENRANLDKIRENLRELMDKEPTVVEVLKYRLWEQQRGECAYTQSQIPLERLFSPGYCEIDHIIPFSRSFDDSLSNKILVLGSENQRKGNRTPYEYFGEDSERWNSFEIWVKGSYLNYKKKANLLKKKFSEEEQRDWKARNLQDTKYICRYISNFVNNRLEFKESENKQKVITVNGRATAYLRSRWGLNKVREDGDKHHALDAAVVGVTTQGMVQKISKYSKAHELYTVRKNDEFVDVETGECVDVDEYKEIRKDILPRPWRGFSEELKLRLSDNPLEELKKSPIETYNEEFIKENVKPIFVSRVPFRKISGKLFKETIYSERAFKDGYFVSKKSLVDLKRGDLDNFYNYECDKKLYDAISERMKEFNYNGKKAFESPFRKPTKSGKEGPVVRSVKIKSAVPFKDGIPMNEGLVAKEGMVRIDIYEKEGKYFVVPVYRYQLAKGIVPKRAAIAKKDELKWPIMDQTYNFKFSIYKNDLIEVKYDKKGVYFGYYDGFDRNSASLTIEKHDNSERYRSIGLKVGVLEINKYEVDVLGNYHKVKLGGN

SEQ ID NO: 64 - protein, 1195 aa, Elusimicrobium minutum
MQKNINTKQNHIYIKQAQKIKEKLGDKPYRIGLDLGVGSIGFAIVSMEENDGNVLLPKEIIMVGSRIFKASAGAADRKLSRGQRNNHRHTRERMRYLWKVLAEQKLALPVPADLDRKENSSEGETSAKRFLGDVLQKDIYELRVKSLDERLSLQELGYVLYHIAGHRGSSAIRTFENDSEEAQKENTENKKIAGNIKRLMAKKNYRTYGEYLYKEFFENKEKHKREKISNAANNHKFSPTRDLVIKEAEAILKKQAGKDGFHKELTEEYIEKLTKAIGYESEKLIPESGFCPYLKDEKRLPASHKLNEERRLWETLNNARYSDPIVDIVTGEITGYYEKQFTKEQKQKLFDYLLTGSELTPAQTKKLLGLKNTNFEDIILQGRDKKAQKIKGYKLIKLESMPFWARLSEAQQDSFLYDWNSCPDEKLLTEKLSNEYHLTEEEIDNAFNEIVLSSSYAPLGKSAMLIILEKIKNDLSYTEAVEEALKEGKLTKEKQAIKDRLPYYGAVLQESTQKIIAKGFSPQFKDKGYKTPHTNKYELEYGRIANPVVHQTLNELRKLVNEIIDILGKKPCEIGLETARELKKSAEDRSKLSREQNDNESNRNRIYEIYIRPQQQVIITRRENPRNYILKFELLEEQKSQCPFCGGQISPNDIINNQADIEHLFPIAESEDNGRNNLVISHSACNADKAKRSPWAAFASAAKDSKYDYNRILSNVKENIPHKAWRFNQGAFEKFIENKPMAARFKTDNSYISKVAHKYLACLFEKPNIICVKGSLTAQLRMAWGLQGLMIPFAKQLITEKESESFNKDVNSNKKIRLDNRHHALDAIVIAYASRGYGNLLNKMAGKDYKINYSERNWLSKILLPPNNIVWENIDADLESFESSVKTALKNAFISVKHDHSDNGELVKGTMYKIFYSERGYTLTTYKKLSALKLTDPQKKKTPKDFLETALLKFKGRESEMKNEKIKSAIENNKRLFDVIQDNLEKAKKLLEEENEKSKAEGKKEKNINDASIYQKAISLSGDKYVQLSKKEPGKFFAISKPTPTTTGYGYDTGDSLCVDLYYDNKGKLCGEIIRKIDAQQKNPLKYKEQGFTLFERIYGGDILEVDFDIHSDKNSFRNNTGSAPENRVFIKVGTFTEITNNNIQIWFGNIIKSTGGQDDSFTINSMQQYNPRKLILSSCGFIKYRSPILKNKEG

SEQ ID NO: 65 - protein, 1101 aa, Akkermansia muciniphila
MSRSLTFSFDIGYASIGWAVIASASHDDADPSVCGCGTVLFPKDDCQAFKRREYRRLRRNIRSRRVRIERIGRLLVQAQIITPEMKETSGHPAPFYLASEALKGHRTLAPIELWHVLRWYAHNRGYDNNASWSNSLSEDGGNGEDTERVKHAQDLMDKHGTATMAETICRELKLEEGKADAPMEVSTPAYKNLNTAFPRLIVEKEVRRILELSAPLIPGLTAEIIELIAQHHPLTTEQRGVLLQHGIKLARRYRGSLLFGQLIPRFDNRIISRCPVTWAQVYEAELKKGNSEQSARERAEKLSKVPTANCPEFYEYRMARILCNIRADGEPLSAEIRRELMNQARQEGKLTKASLEKAISSRLGKETETNVSNYFTLHPDSEEALYLNPAVEVLQRSGIGQILSPSVYRIAANRLRRGKSVTPNYLLNLLKSRGESGEALEKKIEKESKKKEADYADTPLKPKYATGRAPYARTVLKKVVEEILDGEDPTRPARGEAHPDGELKAHDGCLYCLLDTDSSVNQHQKERRLDTMTNNHLVRHRMLILDRLLKDLIQDFADGQKDRISRVCVEVGKELTTFSAMDSKKIQRELTLRQKSHTDAVNRLKRKLPGKALSANLIRKCRIAMDMNWTCPFTGATYGDHELENLELEHIVPHSFRQSNALSSLVLTWPGVNRMKGQRTGYDFVEQEQENPVPDKPNLHICSLNNYRELVEKLDDKKGHEDDRRRKKKRKALLMVRGLSHKHQSQNHEAMKEIGMTEGMMTQSSHLMKLACKSIKTSLPDAHIDMIPGAVTAEVRKAWDVFGVFKELCPEAADPDSGKILKENLRSLTHLHHALDACVLGLIPYIIPAHHNGLLRRVLAMRRIPEKLIPQVRPVANQRHYVLNDDGRMMLRDLSASLKENIREQLMEQRVIQHVPADMGGALLKETMQRVLSVDGSGEDAMVSLSKKKDGKKEKNQVKASKLVGVFPEGPSKLKALKAAIEIDGNYGVALDPKPVVIRHIKVFKRIMALKEQNGGKPVRILKKGMLIHLTSSKDPKHAGVWRIESIQDSKGGVKLDLQRAHCAVPKNKTHECNWREVDLISLLKKYQMKRYPTSYTGTPR

SEQ ID NO: 66 - protein, 1187 aa, Bifidobacterium longum
MLSRQLLGASHLARPVSYSYNVQDNDVHCSYGERCFMRGKRYRIGIDVGLNSVGLAAVEVSDENSPVRLLNAQSVIHDGGVDPQKNKEAITRKNMSGVARRTRRMRRRKRERLHKLDMLLGKFGYPVIEPESLDKPFEEWHVRAELATRYIEDDELRRESISIALRHMARHRGWRNPYRQVDSLISDNPYSKQYGELKEKAKAYNDDATAAEEESTPAQLVVAMLDAGYAEAPRLRWRTGSKKPDAEGYLPVRLMQEDNANELKQIFRVQRVPADEWKPLFRSVFYAVSPKGSAEQRVGQDPLAPEQARALKASLAFQEYRIANVITNLRIKDASAELRKLTVDEKQSIYDQLVSPSSEDITWSDLCDFLGFKRSQLKGVGSLTEDGEERISSRPPRLTSVQRIYESDNKIRKPLVAWWKSASDNEHEAMIRLLSNTVDIDKVREDVAYASAIEFIDGLDDDALTKLDSVDLPSGRAAYSVETLQKLTRQMLTTDDDLHEARKTLFNVTDSWRPPADPIGEPLGNPSVDRVLKNVNRYLMNCQQRWGNPVSVNIEHVRSSFSSVAFARKDKREYEKNNEKRSIFRSSLSEQLRADEQMEKVRESDLRRLEAIQRQNGQCLYCGRTITFRTCEMDHIVPRKGVGSTNTRTNFAAVCAECNRMKSNTPFAIWARSEDAQTRGVSLAEAKKRVTMFTFNPKSYAPREVKAFKQAVIARLQQTEDDAAIDNRSIESVAWMADELHRRIDWYFNAKQYVNSASIDDAEAETMKTTVSVFQGRVTASARRAAGIEGKIHFIGQQSKTRLDRRHHAVDASVIAMMNTAAAQTLMERESLRESQRLIGLMPGERSWKEYPYEGTSRYESFHLWLDNMDVLLELLNDALDNDRIAVMQSQRYVLGNSIAHDATIHPLEKVPLGSAMSADLIRRASTPALWCALTRLPDYDEKEGLPEDSHREIRVHDTRYSADDEMGFFASQAAQIAVQEGSADIGSAIHHARVYRCWKTNAKGVRKYFYGMIRVFQTDLLRACHDDLFTVPLPPQSISMRYGEPRVVQALQSGNAQYLGSLVVGDEIEMDFSSLDVDGQIGEYLQFFSQFSGGNLAWKHWVVDGFFNQTQLRIRPRYLAAEGLAKAFSDDVVPDGVQKIVTKQGWLPPVNTASKTAVRIVRRNAFGEPRLSSAHHMPCSWQWRHE

SEQ ID NO: 67 - protein, 166 aa, Unknown
  uncultured Termite group 1 bacterium phylotype Rs-D17
MNKVQEIEYKKIREKLADREYRIGLDLGVGSIGYVVVSLKECNDLSYLPEDIILSGSRIFKSSIGAVERREFRLQRNSHRHHRERMRFLWQLLAEKQLALQSSKDLEKKENSADCETSQKRFPINILKEDPYILRYKALEEKLSLFQLGYVLYHIANHSNTAYENT

SEQ ID NO: 68 - protein, 1032 aa, Unknown
  uncultured Termite group 1 bacterium phylotype Rs-D17
MLYHIANHRGTDSVRSFLEYDDDKIKENTLTAKIAKETKKVIDAKKYRTFGEYLYKGKIEKFQQNIRKKVSNRKTPANKNKEFAVTRDVIIKETEKILASQKQYYTYILTDEYIKKIKDAISYQTEKLIPESGYCPYFKDEKRLPRSHKLNEYRRMYEALNNAKYFDPVLDENTGEILSYQEKEFSREEKKILFDEVLLKGMELTESGAKKLLYHLPDGCEVQLQGRDKTTQKIKGYALVDLEASPFWLRLSQQQQDEFLYDWNSLPLEKLKPKLTNYYSLTESEVDETFQEIKLPSNYASVGKKAMEILLTYIKDGCSYTEALEKAVSEGKLKVDKQTMIYDSLPYYGKILKESTQKLIGKAFSKQFADRNYKEPDTNKNEREFGKIANPVVHQTLNELRKLINEIITVFGKKPLEIGLETTRELKKSKKNREYLSKQQNKNEYARNRIYKEYIEPHLSQIKSRQENPSKYISKFELLEEQNFICPFCSEKITPDDIINSKVDVEHIFPIEESEDITKNNLVIAHNECNADKGKKSPFDAFGDKTSGKYRWNCILHNAQKNLPHKVWRFYQGSLEKFLENKPMSRRFGTDNSYISKIAARYLACLFNDPYHSEIFCIKSSLIAQLRIAWDLNSIMVPLVKNILSEKELEEFKISKNKKIRIDNRHHALDAIVIAYANRGYHNFLNRIHAKEYKINYREKSWLSKILLPPLNRDLEDFKISVKDSIEKANVSIKHDHNTNGSLVKATAYKVYYSGAGEYIITTSKNVEEISFKEKEDPKDTLYRALCKFECRDIDIKDEKLIKKLKYNSTLYKKVQNNLSKAKQELEQDNKKTEEEGKKSQKITEVRIYKKACSLVKGQYIQCGSRLKDKFFAVKEPTEIKTGLGYDTGDNLFLDLYYDKTGKLCGEIIRKVNFNRNKPNYQKEGYTLFERIYQSDILEVDTSEDRISLKNKTGSAPSDRTFIKVNTFTEVNAYFDGKRDKIQIFFGNLLKSSFKNDSFFISSMQKYNVRKVILTSLGIIKYRSQILKNKEV

SEQ ID NO: 69 - protein, 1032 aa, Unknown
  uncultured Termite group 1 bacterium phylotype Rs-D17
MKKRILGLDIGIASVGWALVEFDDEFQDNKKKGTIIKSGVRIFTRAETPKERESLAKPRREARSQRRRIRRRVERLNSIRELFVKNGVVEEWSVSKKNPNNIYITLNQIKTPWQLRMESLDRKLTNEQFAVVLTHLAKHRGYKSLRKDDKAGKVLEAISQNKKRLNDSDYRTLGEMFCKNESYKEHKRNKGGEYINSVARELIEEEVEKIFVKQREKGNNFADVNTEREYLKIAFSQKPAGSISKMVGFCTFENGEKRAPRDSYSAELFKVLCTINNTTFTDMKTGEIRSFSKEEIGKTLETVKNVKDVKYAKIRKDLGLEDSVKFSGVDYRENAKSKGEGEIFVSMKTYHEIKSKIEKLSKEKWDNLKGNTELLDSIVNIIANLKDDESIKKEFQKLKIDEDIIDVLLNFEFKKFINLSFKALRKIIPFQFQGQKYITASTSAGYSLKQEGIKNKLVPPAKENINVAVVARAFAQTRKVINAVIRKYGQFDQINIELATELKNSKFDRSKIEEGQKKFQSQKDKIFKEVQELRGGMTPSSSLLLKYRLWREQDERCVYSGRKISFEDLLDTGFLDIDHIIPYSKSMDDSFNNKVLCLAEENRNKKNDIPFNYYQRIDRDWNLLISIITSMKNMKIAKKSRLLKQELSDIEGFIERNINDTRYATRYIKDFLENNLEFKENEFIKVKVQARSGGLTSVLSYNWGMSKDREESYFHHAKDAIIVACSTQGMVQYISKISQQYENDKDKMKKIKDKTENCIPKPWDSFRADVEESIEGIFVSFAPRHKVTGSAHKETIYSKKHLEKERYVTVKKSLDKIKLSDLENIPCNENCGIIRVLKERLEKFKNDSLKAFADPVHMPTKCPNKKGPVIRSVKIKESNKTGIEVRKGLAERGEMVRVDVFIKDKKYYLVPIYVSDFKNKDLPNKAIAALKLENEWIMIDKTYSFKFSLFKDDLIKIKKKKEEIFGYFGGVHRSTGTIKIKSRHKPKEIDEGIGSRCLLDFRKFQVDVLGNYTEVKHEKRMPAYITRKDKKH

SEQ ID NO: 70 - protein, 1361 aa, Lactobacillus casei
MTKLGKPYGIGVDIGSNSIGFAAVDENSHLIRLKGKTVIGARLFEEGKAAADRRASRTTRRRLSRNRWRLSFLRDFFESHITPTGPNFFMRQKYSEISPKDKARYKYEKRLFNDRTDAEFYQQYPTMYHLRNRLLTDPSKADVREIYFAIHHILKSRGHFLTSGYAKDFNTNKVALNEIFPALQDAYAQVYPDLDITFDENKVNEFKTVLLNEKATPSDTQRALVNLLLAEDGDKDILKQQKQVLTEFAKAVVGLKTKLNVALGTEVDSSEATVWNFSLGQLDDKWAGIESAMTDEGTEILDQIRDLYRARLLNGIVPAGKTLSQAKVDDYAQHHEDLELFKDYLKQLEDDGTAKAIRQLYDRYIDGDDAKPFVREDFVKALTKEVTAHPNAKSPELLERLAQPDFMLKQRNKANGAIPVQMQQRELDQIIKNQSVYYDWLAAPNPVEKHRKSMPYQLDELLNFRIPYYVGPLVTAKEQKAAQGGVFAWMVRKDPDGNITPYNFDEKVDREASANTFIQRMKTTDTYLIGEDVLPKQSLLYQRYEVLNELNNVRVNNEKLSIEQKQQVIRELFERHNSVTIKQFAENLRAHGDYAHIPEIRGLADEKRFLSSLSTYRQLKSLLPDAIDDPAKQADIENIIAWSTVFEDAAIFKTKLKEINWLDSQTITKLSNIRYRGWGQFSHKFLNGLTLGNGHTIIQELFLSNNNLMQILTDETLQKKMTELNADKLKAANINDAIDDAYTSPSNKKALRQVLRVIEDIKRAADGQDPSWLYVETADGGGTPGKRTRARQHQLQEIYANAAHELIDSAVRGELEDKIADKADFNDRLVLYFMQGGRDIYTGTPLNIDQLSSYDIDHILPQSLIKDNSLDNRVLVHAIINREKNATFASTIYAQKMNATWRQWHEAGLISGRKLRNLQMRPDQIDKYASGFVARQLVETRQIIKLTEQIVAAQYPETKIIAVKAGLSHQLREELEFPKNRDVNHYHHAFDAFLAARIGTYLLKRFPNLQAFFTYGKFKKADVKKLRGFNFIRDITHAEDKIVVKDTGEVIWDKKRDVDELDRIYNFKRMLITHEVHFEKADLFKQTVYGAKDSKEAGGKKQLISKKKGYPVDIYGGYTQETGSYLSVVRLTKKAMYAVVKVSTRDAAKLAVAKSISEQKENETLNDIIDEKLSKISKNGKITHELFEVVLPRVGQKTLFKNSKYNLFLVNSDTYMHNYQELWMPREYQKMWKDISLSKYGDAQTEDQLDQIFGFIVSQVNSYFNLYDINQFRKKLNDAADKFATLPMRDTDDMQGKIATIGQLLIGLQANAARSDLRNLDIKTPLGLLQIPNGISLDSDTSVVYQSPTGLLEREVHLSDL

SEQ ID NO: 71 - protein, 1348 aa, Streptococcus equi
MKKPYTIALDIGTNSVGWVVVTDDYRVPTKKMKVLGNTERKTIKKNLIGALLFDSGDTAEGTRLKRTARRRYTRRKNRLRYLKEIFTEEMAKVDDGFFQRLEDSFYVLEDKEGNKHPIFANLADEVAYHKKYPTIYHLRKELVDNPQKADLRLIYLAVAHIIKFRGHFLIEGTLSSKNNNLQKSFDHLVDTYNLLFEEQRLLTEGINAKELLSAALSKSKRLENLISLIPGQKKTGIFGNIIALSLGLTPNFKANFGLSKDVKLQLAKDTYADDLDSLLAQIGDQYADLFLAAKNLSDAILLSDILTESDEITRAPLSASMVKRYREHHKDLVTLKTLIKDQLPEKYQEIFLDKTKNGYAGYIEGQVSQEEFYKYLKPILARLDGSEPLLLKIDREDFLRKQRTFDNGSIPHQIHLEELHAILRRQEVFYPFLKDNRKKIESLLTFRIPYYVGPLARGHSRFAWVKRKFDGAIRPWNFEEIVDEEASAQIFIEKMTKNDLYLPNEKVLPKHSLLYETFTVYNELTKVKYATEGMTRPQFLSADQKQAIVDLLFKTNRKVTVKQLKENYFKKIECWDSVEITGVEDSFNASLGTYHDLLKIIQDKDFLDNPDNQKIIEDIILTLTLFEDKKMISKRLDQYAHLFDKVVLNKLERHHYTGWGRLSGKLINGIRDKQSGKTILDFLKADGFANRNFMQLIHDSELSFIDEIAKAQVIGKTEYSKDLVGNLAGSPAIKKGISQTIKIVDELVKIMGYLPQQIVIEMARENQTTAQGIKNARQRMRKLEETAKKLGSNILKEHPVDNSQLQNDKRYLYYLQNGKDMYTGDDLDIDYLSSYDIDHIIPQSFIKNNSIDNKVLTSQGANRGKLDNVPSEAIVRKMKGYWQSLLRAGAISKQKFDNLTKAERGGLTQVDKAGFIQRQLVETRQITKHVAQILDSRFNTEFDDHNKRIRKVHIITLKSKLVSDFRKEFGLYKIRDINHYHHAHDAYLNAVVAKAILGKYPQLAPEFVYGDYPKYNSFKERQKATQKMLFYSNILKFFKDQESLHVNSDGEEIWNANKHLPIIKNVLSIPQVNIVKKTEVQTGGFYKESILSKGNSDKLIPRKNNWDTRKYGGFDSPTVAYSVLVIAKMEKGKAKVLKPVKEMVGITIMERTAFEENPVVFLEARGYREIQEHLIIKLPKYSLFELENGRRRLLASASELQKGNELFLPVDYMTFLYLAAHYHELTGSSEDVLRKKYFVDRHLHYFDDIIQMINDFAERHILASSNLEKINHTYHNNSDLPVNERAENIINVFTFVALGAPAAFKFFDATIDRKRYTSTKEVLNATLIHQSVTGLYETRIDLSQLGEN

SEQ ID NO: 72 - protein, 1341 aa, Ruminococcus lactaris
MGKGYYVGLDMGTGSVGWAVTDESYQILRRHGKAMWGVRLFESAKTAEERRMFRTGRRRLDRRGWRIEILQEIFAEEISRVDPGFFLRMKESKYYPEDKRDIQGNCPELPYTLFVDKTFTDKDFHKKYPTIYHLRKMLMETEDTPDMRLVYLALHHMMKHRGHFLLSGDISQVTEFKNTFNQFIENIRNEEMDFEIELDESAVQMIEETLKDKNLTRSAKKSKLVKGLNAKNVRDKAFLTLLSGGTVKLSDLFGMEELNEGERPKISFADNGYEEYAAVVEMELGELYYIVESAKAVYDWAILSDILGGSTSVSDAKVRAYEKHKADLKYLKAVVKEYFPKEVYNAVFVESSDKLNNYPAYIGMTKKNGKKVSLEGKRCSREEFMDFLKKNIVVKLPDEEAKMYLQSELEKDSFLPKQVNKDNGVIPYQVHKYELKKILDNLGDKIPFLKENAEKIEKLFSFRIPYYVGPLRTGNGENSKFAWAERKSTEKIYPWNFENVIDVEQSAENFIRRMTNKCTYLIGEDVLPKDSLLYSKFMVLNELNNLRLDGQKISVELKQKIYRDVFCRSRKVTQKKLKSYLIREGIAGKNVELTGIDGDFKGSLTAYHDFKEKLIDVELTQKEKEEIILNIVLFGDDKKLLKQRLKKKFPQLTEKQINTVTALSYKGWGRLSKKLLEEVTVPAPETGEVWNIITALWETNDNFMQLLSKEYQFSDRIEEFNEEKADPEVSYQTIEDLYVSPAVKRQIWQTLQIIQEIEKVMGEKPKRVFVEMAREKQENKRTESRKKTLSDLYTKCKKEEPEWIEALCTSLEKHEEHQLRSDKLYLYYTQKGRCMYSGEPIDLEDLWDNTKYDIDHIYPQSKTMDDSLKNRVLVKKEYNAKKSDTYPIAADIQKKMMPFWKSLLTGGFIPKEKYDRLVRNNPLDANELAGFIERQIVETRQSTKAVAEILKKILPDTEIVYVKAKTVSKFRQDFDFIKVRDMNDLHHAKDAYLNIVVGNVYFVKFTKNAAWFVKENPGRTYNLEKMFIWDVARDGEIAWKAGKSGSIVQVRAMMEKNHILVTRRSYEVKGGLFDQQILKKGKGQVPVKESDERLRDIGKYGGYNKAAGVYFMLVSSKDKKGKEQRTIEFVPIYLKDRVEKDMESARNYLMEERGLREPKILIKKIKIDTLFKVDGFYMWLSGRTSNQLIFKGANQLILSKEDMKTLKKVVKYIQRQKEDKNVKISMRDGITEEELLKLYETFLDKIRHSIYGARLSSQEKTLVNGKEKFIDLSVEAKCQVLYEILHLFQCQSGAANLKMIGGPASAGILVMNNNISKCKNISIVNQSPTGIYEKEIDLLRV

SEQ ID NO: 73 - protein, 1003 aa, Gluconacetobacter diazotrophicus
MIDESLTFGIDLGIGSCGWAVLRRPSAFGRKGVIEGMGSWCFDVPETSKERTPTNQIRRSNRLLRRVIRRRRNRMAAIRRLLHAAGLLPSTDSDALKRPGHDPWELRARGLDKPLKPVEFAVVLGHIAKRRGFKSAAKRKATNISSDDKKMLTALEATRERLGRYRTVGEMFARDPDFASRRRNREGKYDRTTARDDLEHEVHALFAAQRRLGQGFASPELEEAFTASAFHQRPMQDSERLVGFCPFERTEKRAAKLTPSFERFRLLARLLNLRITTPDGERPLTVDEIALVTRDLGKTAKLSIKRVRTLIGLEDNQRFTTIRPEDEDRDIVARTGGAMTGTATLRKALGEALWTDMQERPEQLDAIVQVLSFFEANETITEKLREIGLTLAVLDVLLTALDAGVFAKFKGAAHISTKAARNLLPHLEQGRRYDEACTMAGYDHAASRLSHHGQIVAKTQFNALVTEIGESIANPIARKALIEGLKQIWAMRNHWGLPGSIHVELARDVGNSIEKRREIEKHIEKNTALRARERREVHDLLDLEDVNGDTLLRYRLWKEQGGKCLYTGKAIHIRQIAATDNSVQVDHILPWSRFGDDSFNNKTLCLASANQQKKRSTPYEWLSGQTGDAWNAFVQRIETNKELRGFKKRNYLLKNAKEAEEKFRSRNLNDTRYAARLFAEAVKLLYAFGERQEKGGNRRVFTRPGALTAALRQAWGVESLKKQDGKRINDDRHHALDALTVAAVDEAEIQRLTKSFHEWEQQGLGRPLRRVEPPWESFRADVEATYPEVFVARPERRRARGEGHAATIRQVKERECTPIVFERKAVSSLKEADLERIKDGERNEAIVEAIRSWIATGRPADAPPRSPRGDIITKIRLATTIKAAVPVRGGTAGRGEMVRADVFSKPNRRGKDEWYLVPVYPHQIMNRKAWPKPPMRSIVANKDEDEWTEVGPEHQFRFSLYPRSNIEIIRPSGEVIEGYFVGLHRNTGALIPTPVGPDSYVIA

SEQ ID NO: 74 - protein, 1368 aa, Streptococcus pyogenes
MDKKYSIGLDIGTNSVGWAVITDDYKVPSKKFKVLGNTDRHSIKKNLIGALLFDSGETAEATRLKRTARRRYTRRKNRICYLQEIFSNEIAKVDDSFFHRLEESFLVEEDKKHERHPIFGNIVDEVAYHEKYPTIYHLRKKLADSTDKADLRLIYLALAHMIKFRGHFLIEGDLNPDNSDVDKLFIQLVQTYNQLFEENPINASRVDAKAILSARLSKSRRLENLIAQLPGEKRNGLFGNLIALSLGLTPNFKSNFDLAEDAKLQLSKDTYDDDLDNLLAQIGDQYADLFLAAKNLSDAILLSDILRVNTEITKAPLSASMIKRYDEHHQDLTLLKALVRQQLPEKYKEIFFDQSKNGYAGYIDGGASQEEFYKFIKPILEKMDGTEELLAKLNREDLLRKQRTFDNGSIPHQIHLGELHAILRRQEDFYPFLKDNREKIEKILTFRIPYYVGPLARGNSRFAWMTRKSEETITPWNFEEVVDKGASAQSFIERMTNFDKNLPNEKVLPKHSLLYEYFTVYNELTKVKYVTEGMRKPAFLSGEQKKAIVDLLFKTNRKVTVKQLKEDYFKKIECFDSVEISGVEDRFNASLGTYHDLLKIIKDKDFLDNEENEDILEDIVLTLTLFEDREMIEERLKTYAHLFDDKVMKQLKRRRYTGWGRLSRKLINGIRDKQSGKTILDFLKSDGFANRNFMQLIHDDSLTFKEDLQKAQVSGQGDSLHEHIANLAGSPAIKKGILQTVKVVDELVKVMGRHKPENIVIEMARENQTTQKGQKNSRERMKRIEEGIKELGSDILKEYPVETTQLQNEKLYLYYLQNGRDMYVDQELDINRLSDYDVDHIVPQSFLKDDSIDNKVLTRSDKNRGKSDNVPSEEVVKKMKNYWKQLLNAKLITQRKFDNLTKAERGGLSELDKAGFIKRQLVETRQITKHVAQILDSRMNTKYDENDKLIREVRVITLKSKLVSDFRKDFQFYKVREINNYHHAHDAYLNAVVGTALIKKYPKLESEFVYGDYKVYDIRKMIAKSEQEIGKATAKYFFYSNIMNFFKTEITLANGEIRKRPLIETNGETGEIVWDKGRDFATVRKVLSMPQVNIVKKTEVQTGGFSKESILPKRNSDKLIARKKDWDPKKYGGFDSPTVAYSVLVVAKVEKGKSKKLKSVKELVGITIMERSSFEKDPVDFLEAKGYKEVRKDLIIKLPKYSLFELENGRKRMLASAGELQKGNELALPSKYVNFLYLASHYEKLKGSPEDNEQKQLFVEQHKHYLDEIIEQISEFSKRVILADANLDKVLSAYNKHRDKPIREQAENIIHLFTLTNLGAPAAFKCFDTTIGRNRYKSIKEVLDATLIHQSITGLYETRIDLSQLGGD

SEQ ID NO: 75 - protein, 1504 aa, Bacteroides dorei
MKNIVGLDLGTNSIGWAVVNGSVNDDGSEQLVKIQASGSRIIPMDAAMIGDFNKGNSISQTAERTRLRGVRRLSERYLLRRERLHRILDILGFLPFHFAQDLDRHGKIVKGKEPKLAWRKNEAGQFEFIFQDSFKEMLEDFKLNYPNLITDDKKVPYDWTIYYLRKKGLTSKISKEELAWILLNFNQKRGYYQLRGEEEEENKDKLVEFYALKVVAVEDSGEKKGKDIWYNVHLENGWVYRRTSNMSLDWVGKTKEFIVTTDLEKDGTPKKDKEGNVKRSFRAPKEDDWSLVKKKTEADIDQTHKTVGAYIYDTLLGNPSQKIRGRLVRTIERKYYKEELKLILEKQKEFHLELQDRALYAACIEELYPINEAHRNNVGNRDFTYLFLEDILFYQRPLKSKKSLIDNCPYEENQGLDKETGEIKSFPVKCIAKSHPLFQEFRLWQFIINLRIYRKDLAQDVDVTNELLKTEEDYVALFDWLNGKKEIDQKAFLKYPVFGLKKEIENYRWNYVQDKPYPCNETRSLMLARLEKCDISIEFLTKENEEALWHILYSVEDKNEIVKALQKFADKHDLNASFVDVFQKFPPFKKEYGSYSAKAIKKLLPLMRMGKYWSENSIDKGTRERIDKIITGEYDEKIENRVREKAIHLADVSDFKGLPLWLVCYIVYGRHSEAKEIIQWKSPADIDSYLRSFKQHSLRNPIVEQIIIETLRVVRDIWKQVGNIDEIHVELGREMKNPADKRKKMTQQMSENENTNLRIKYLLTEFLNPEYEVENVRPYSPSQQDILRIYEEGVLNSVSDLPEEISDILKKFTETDLKKRPSRSEVLRYKLWLEQKYRSPYTGEVIPLGKLFTPAYEIEHVIPQSYYFDDSFSNKVICEAEVNKLKSNLLGHEFIVKHHGEIVELPFGKKVRIFTVDEYEQFVKDNYSRTRSKMKKLLMDDIPEEFVTRQLNDSRYISKVVKSLLSNIVREKGEEEAISKNVIPCTGGVTDRLKKDWGINEVWNKIILPRFQRLNELTGTNKFTTKNVGIQEIPTMPLELQKGFNKKRIDHRHHAMDAIIIACANRNIINYLNNKSATAKAELSRYDLQKMLCDKAKTDNNGNYKWVIRKPWASFTQDTYLALENIIVSFKQNLRVINKATNRFLHYNEEGKKIFVKQGKGDNWAIRKSMHKDTVFGEVNLRRIKTVALNEAMKNPQSIVVKDFKRKLLELWNLGFDAKRIKKYFEDNRETWSDINLSKIEVYYFSKDTKDRFFATRKPLDTSFDRKKIENNITDTGIQKILLRHLELKDNNPDIAFSPDGIDEMNRNIIQLNNGKYHQPIIKIRWYEQADKFAVGQTGNKSSKFVEAAKGTNLFFAVYESNILDKKTNTIIKKRNYATIPLNVAIERQKQGLPVAPEDENGNDPIFVLSPNDLVYLPTDDELANGIIAQPLDRGRIYKMVSSSGEQCFFIKHIVANVLVDKFEFSPLNKMERALTGEMIKMICIPIKVDRLGNVLESSSSYKK

SEQ ID NO: 76 - protein, 1426 aa, Capnocytophaga sputigena
MKNILGLDLGITSISFAHIVEDENKEKSEIKELGVRIVSLTTDEQSDFEKGKSITTNANRTLKHGARLNLDRYQQRRKYLIDLLQKANLITSSSILAENGKNTTHSTWQLRAKAVTERIEKEEFARVLLAINKKRGYKSSRKAKTEDEGQAIDGMAIAKRLYDENLTPGQLSLQLLQQNKKLLPDFYRSDLQREFDLVWNFQKQFYPDILTDSFYKELQGKGKDATSKAFSKRYHFDTAENKGSKESVRLQAYQWRAEAISKQLSKEEVAYVLTEINNNLNNASGYLGAISDRSKELYFNRQTVGQYLYAQLQENRHNSLKNKVFYRQDYLDEFERIWETQASFHKELTDELKKQIRDVVIFYQRKLKSQKGLISFCEFESKEIEIEKDGKTITKTIGARVVPKSSPLFQEFKIWQILNNVTCKRKGIRKKKSSAKSTELDLFNEPSQTIFSLDMECKQLLFDELNLKGDLKSDKVLKLLGYSPQEWEINYNQLEGNRTQKALYEAYLKIVEMEAHDVKDILQIKSAKDDWSLDESPLSASEIKEKVKDIFQALGICTKILYFDPLLPVKEFEKQDSYQLWHLLYSYESDDSTSGNETLYRILEKKYAFKREHARILANVALQDDYGSLSTKAIRKIYPNIKENQYSKACELAGYKHSKLSLTTEELEARELKNIIPLLKKNALRNPVVEKILNQMINVVNALIEKNSERDAEGKITKYFHFDEIRIELARELKKNAQKRYEMTQNINKAKLEHQKISEILQKKFGIKNPTKSDIIRYRLYQELEHNGYKELYTNAPIARDMLFSKNIEIEHIVPKARVFDDSFSNKTLTFHRINSNKGEYTAFDYITSLNSEEELNQYLTRVENAYKTKSISLTKYKNLLKKASEIGDGFINRDLRDTQYIAKKAKEILFQVTKNVLSTSGSITDRLREDWGLVDVMKELNMPKYQSLGLTEVEERKEGNKVTVIKNWTKRNDHRHHAMDALTVAFTKPSYIQYLNHLNARKDENNKNYSVILAIEEKETIKVPTNNGKNKRVFIEPIPNFRQVAKKHLEEIFISHKAKNKVVTKNVNKPAGTDKQQITLTPRGQLHKETIYGKYQYYVNKEEKVGVKFDERTITKVSNPLYREALLKRLQANDNDPKKAFTGKNALSKNPIYLDETKTKTLPEKVNLTYLEEDFSIRKDISPDNFKDLKSIEKVIDQGVKRILIKRLQDYDNDPKKAFVDLEKNPIWLNKEKGIAIKRVTISGVSNAQPLHIGKDHLGKTTLNKEGNEIPVDYVSTGNNHHVAIYRDKEGNLQEQIVSFFEAVVRTQQGLPIIDKTYKQEEGWQFLFTMKQNEMFVFPNATTGFNPAEIDLLDPKNKKLISPNLFRVQKIATKDYFFRHHLETNVETDNVLKNTTWKREGLSGLKDIVKVRINHLGDIVSIGEY

SEQ ID NO: 77 - protein, 1443 aa, Parabacteroides johnsonii
MIKLLYLEKLKQYTMKKILGLDLGTSSIGWALVNEAENSDEVSSIIKLGVRVNPLTVDEMQNFEKGKSITTNADRTLKRSMRRNLQRYKLRRDALIELLKKVGFITDKTILSEQGNRTTFETYRLRAKAAEEEISLKELARVLLMINKKRGYKSSRKAKGEEEGALIDGMEIAKKLYDEDLTPGQLCLQLLESGKKFFPDFYRSDLQEEFNKIWDFQKQFNLFSFCDVAKEEVKGKNKSQTWAILAKYFVETKKVNVWNEHEAQTENREEVYKLVGLKRTVKGEELKKENYRWRVQALTEQLDLEKIAVVLQEINGQISASSGYLGAISDRSKVLYFNRQTVGQYQMAELNKNPNMSLRNMVFYRQDYLDEFNVIWEKQAEFHKELTPELKKEIRDIIIFYQRRLKSQKGLISFCEFENREVVVEKEGKKQTKIIGCKVIPRSHPLFQEFKIWQTLNNIEVFVGEKKGKRKKSNVSSDLFGDTEDALITEGRRFLYQEEKKILAKELSIKKGLTKAEILRLLFENPQELDINFKQIDGNQTGFALFSAYSNMIEKYGYEPLDFKKPAEDLISQLKTVFTDLGWNTDLLFIDLDKENKEWEKQPYFRLWHLLYSFEGDNTPTGNGKLIEKIMQLCGIEKEYAIELANVSLQDDYGSLSAKAIKKILLYLKEGNQYDMACEYAGYRHSKSSLTKEEIENKVLKDKLEILPKNSLRNPVVEKILNQMVNVINTVMEVYGRPDEIRVELARELKKSAKEREELTKAVAKNTREHEEIRKVLQSEFGMINVSRNDIIRYKLYEELKDNGYKTLYSNQYIPREKLFSKEIDIEHIIPQSRLFDDSLSNKTLEYKSINIEKGNKTAYDFVKEKYGEEGLQQYLNRCENLCKDKKAKLRKLKMELNEIPDGFIDRDLRNTQYIAKKALSMLTEICRRVVATTGSITDKLREDWQLVDVMKELNLPKYEALGLVEVYEDKDGRKIKRIKDWTKRNDHRHHAMDALTVAFTKDVFIQYFNNKNAAWESDSKEHTNIVGIKTRYFESGKAVPPIPLGQFRVEAKCHLENLLVSIKAKNKVVTTNVNCIKKKGGTYKNTQQTPRGQLHLETIYGSHNQYVTKIEKVNASFDAVKIATVSKQDYRNALLKRLEVFGNDPKKAFTGKNSLEKNPIYLDRAQTIQVPDKVQTVELETAYTIRKPVDPTLNVDKVVDKKIRLILEQRLKEYGGDAKKAFVNLDENPIWLNEEKGISIKRVTIRGISKAQALHDKKDKDGNFILDETGKRIPVDFVNTGNNHHVAIYRKPVLDKKGQVIFDDEGNPMYELDEDVVPFFEAVTRANLGIPIIDKDYKKSEGWQFLFSMKQNEYFVFPNEKTGFNPKEVDLLDPDNYAMISPNLFRVQKIGLNDYTFRHHLETTIQNDLKFITWIRCGKSGIKDIVKVRINHIGQIVSVGEY

SEQ ID NO: 78 - protein, 984 aa, Campylobacter jejuni
MARILAFDIGISSIGWAFSENDELKDCGVRIFTKVENPKTGESLALPRRLARSARKRLARRKARLNHLKHLIANEFKLNYEDYQSFDESLAKAYKGSLISPYELRFRALNELLSKQDFARVILHIAKRRGYDDIKNSDDKEKGAILKAIKQNEEKLANYQSVGEYLYKEYFQKFKENSKEFTNVRNKKESYERCIAQSFLKDELKLIFKKQREFGFSFSKKFEEEVLSVAFYKRALKDFSHLVGNCSFFTDEKRAPKNSPLAFMFVALTRIINLLNNLKNTEGILYTKDDLNALLNEVLKNGTLTYKQTKKLLGLSDDYEFKGEKGTYFIEFKKYKEFIKALGEHNLSQDDLNEIAKDITLIKDEIKLKKALAKYDLNQNQIDSLSKLEFKDHLNISFKALKLVTPLMLEGKKYDEACNELNLKVAINEDKKDFLPAFNETYYKDEVTNPVVLRAIKEYRKVLNALLKKYGKVHKINIELAREVGKNHSQRAKIEKEQNENYKAKKDAELECEKLGLKINSKNILKLRLFKEQKEFCAYSGEKIKISDLQDEKMLEIDHIYPYSRSFDDSYMNKVLVFTKQNQEKLNQTPFEAFGNDSAKWQKIEVLAKNLPTKKQKRILDKNYKDKEQKNFKDRNLNDTRYIARLVLNYTKDYLDFLPLSDDENTKLNDTQKGSKVHVEAKSGMLTSALRHTWGFSAKDRNNHLHHAIDAVIIAYANNSIVKAFSDFKKEQESNSAELYAKKISELDYKNKRKFFEPFSGFRQKVLDKIDEIFVSKPERKKPSGALHEETFRKEEEFYQSYGGKEGVLKALELGKIRKVNGKIVKNGDMFRVDIFKHKKTNKFYAVPIYTMDFALKVLPNKAVARSKKGEIKDWILMDENYEFCFSLYKDSLILIQTKDMQEPEFVYYNAFTSSTVSLIVSKHDNKFETLSKNQKILFKNANEKEVIAKSIGIQNLKVFEKYIVSALGEVTKAEFRQREDFKK

SEQ ID NO: 79 - protein, 1082 aa, Neisseria meningitidis
MAAFKPNPINYILGLDIGIASVGWAMVEIDEDENPICLIDLGVRVFERAEVPKTGDSLAMARRLARSVRRLTRRRAHRLLRARRLLKREGVLQAADFDENGLIKSLPNTPWQLRAAALDRKLTPLEWSAVLLHLIKHRGYLSQRKNEGETADKELGALLKGVADNAHALQTGDFRTPAELALNKFEKESGHIRNQRGDYSHTFSRKDLQAELILLFEKQKEFGNPHVSGGLKEGIETLLMTQRPALSGDAVQKMLGHCTFEPAEPKAAKNTYTAERFIWLTKLNNLRILEQGSERPLTDTERATLMDEPYRKSKLTYAQARKLLGLEDTAFFKGLRYGKDNAEASTLMEMKAYHAISRALEKEGLKDKKSPLNLSPELQDEIGTAFSLFKTDEDITGRLKDRIQPEILEALLKHISFDKFVQISLKALRRIVPLMEQGKRYDEACAEIYGDHYGKKNTEEKIYLPPIPADEIRNPVVLRALSQARKVINGVVRRYGSPARIHIETAREVGKSFKDRKEIEKRQEENRKDREKAAAKFREYFPNFVGEPKSKDILKLRLYEQQHGKCLYSGKEINLGRLNEKGYVEIDHALPFSRTWDDSFNNKVLVLGSENQNKGNQTPYEYFNGKDNSREWQEFKARVETSRFPRSKKQRILLQKFDEDGFKERNLNDTRYVNRFLCQFVADRMRLTGKGKKRVFASNGQITNLLRGFWGLRKVRAENDRHHALDAVVVACSTVAMQQKITRFVRYKEMNAFDGKTIDKETGEVLHQKTHFPQPWEFFAQEVMIRVFGKPDGKPEFEEADTPEKLRTLLAEKLSSRPEAVHEYVTPLFVSRAPNRKMSGQGHMETVKSAKRLDEGVSVLRVPLTQLKLKDLEKMVNREREPKLYEALKARLEAHKDDPAKAFAEPFYKYDKAGNRTQQVKAVRVEQVQKTGVWVRNHNGIADNATMVRVDVFEKGDKYYLVPIYSWQVAKGILPDRAVVQGKDEEDWQLIDDSFNFKFSLHPNDLVEVITKKARMFGYFASCHRGTGNINIRIHDLDHKIGKNGILEGIGVKTALSFQKYQIDELGKEIRPCRLKKRPPVR

SEQ ID NO: 80 - protein, 1021 aa, Clostridium cellulolyticum
MKYTLGLDVGIASVGWAVIDKDNNKIIDLGVRCFDKAEESKTGESLATARRIARGMRRRISRRSQRLRLVKKLFVQYEIIKDSSEFNRIFDTSRDGWKDPWELRYNALSRILKPYELVQVLTHITKRRGFKSNRKEDLSTTKEGVVITSIKNNSEMLRTKNYRTIGEMIFMETPENSNKRNKVDEYIHTIAREDLLNEIKYIFSIQRKLGSPFVTEKLEHDFLNIWEFQRPFASGDSILSKVGKCTLLKEELRAPTSCYTSEYFGLLQSINNLVLVEDNNTLTLNNDQRAKIIEYAHFKNEIKYSEIRKLLDIEPEILFKAHNLTHKNPSGNNESKKFYEMKSYHKLKSTLPTDIWGKLHSNKESLDNLFYCLTVYKNDNEIKDYLQANNLDYLIEYIAKLPTFNKFKHLSLVAMKRIIPFMEKGYKYSDACNMAELDFTGSSKLEKCNKLTVEPIIENVTNPVVIRALTQARKVINAIIQKYGLPYMVNIELAREAGMTRQDRDNLKKEHENNRKAREKISDLIRQNGRVASGLDILKWRLWEDQGGRCAYSGKPIPVCDLLNDSLTQIDHIYPYSRSMDDSYMNKVLVLTDENQNKRSYTPYEVWGSTEKWEDFEARIYSMHLPQSKEKRLLNRNFITKDLDSFISRNLNDTRYISRFLKNYIESYLQFSNDSPKSCVVCVNGQCTAQLRSRWGLNKNREESDLHHALDAAVIACADRKIIKEITNYYNERENHNYKVKYPLPWHSFRQDLMETLAGVFISRAPRRKITGPAHDETIRSPKHFNKGLTSVKIPLTTVTLEKLETMVKNTKGGISDKAVYNVLKNRLIEHNNKPLKAFAEKIYKPLKNGTNGAIIRSIRVETPSYTGVFRNEGKGISDNSLMVRVDVFKKKDKYYLVPIYVAHMIKKELPSKAIVPLKPESQWELIDSTHEFLFSLYQNDYLVIKTKKGITEGYYRSCHRGTGSLSLMPHFANNKNVKIDIGVRTAISIEKYNVDILGNKSIVKGEPRRGMEKYNSFKSN

SEQ ID NO: 81 - protein, 1131 aa, Acidovorax ebreus
MAQHVFGLDIGIASVGWAILGEQRIIDLGVRCFDKAETAKEGDPLNLTRRQARLLRRRLYRRAWRLTQLSRLLKRKGLIADAKLFAKAPSYGDSAWELRRQGLDRLLTPLEWARVIYHQCKHRGFHWTSKAEEAKADSDAEGGRVKQGLAHTKALMQAKNYRSAAEMVLAEFPDAQRNKRGQYDKALSRVLLGEELALLFATQRRLGNPHASDFFEKLILGDGDRKSGLFWQQKPALSGADLLKMLGKCTFEKGEYRAPKASFSVERHVWLTRLNNLRIVVDGRSRPLNEAERQAALLLPYQTETSKYKTLKNAFIKAGLWGDGVRFGGLAYPSQAQIDAEKTKDPEDQFLVKLPAWHELRKAFKAAGHEALWQQISTPALDGDPTLLDQIATVLSVYKDGAEVVQQLRQLALPEPAASIAVLEKISFDKFSSLSLKALRRIVPLMQSGLRYDEAVAQIPEYGHHSQRIEPGAAKHLYLPPFYEAQRKYAGKGDHIGSMQFRDDADIPRNPVVLRALNQARKVVNALIREYGSPIAVNIEMARDLSRPLDERNKVKRAQEEFRDRNDRARSEFERDFGYKPKAAAFEKWMLYREQLGQCAYSQQPLDIQRVLDDHNYAQVDHALPYSRSYDDSKNNKVLVLTHENQNKGNRTAFEYLTSFPDGEDGERWRTFVAWVQGNKAYRMAKRNRLLRKNYGVDESKGFIDRNLNDTRYICKFFKNYVEEHLQLAARADGDTARRCVVVNGQLTAFLRARWGLTKVRGDSDRHHALDAAVVAACTHGMVKALADYSRRKEISFLQEGFPDPETGEILNPAAFDRARQHFPEPWTHFAHELKARLFTDDLAALREDMQRLGSYTTEDLGRLRTLFVSRAPQRRSGGAVHKETIYAQPESLKQQGGVIEKILLTSLKLQDFDKLLNPESNDHFVEPHRNERLYAAIRQRLEQFGGRADKAFGPDNLFHKPDKNNQPTGPVVRSIKLVRGKQTGIPIRGGLAKNDSMLRVDIFTKAGKFHLVPVYVHHRVTGLPNRAIVAFKDEDEWTLIDESFAFLFSVYPNDYVKVTLKKEQQSGYYSGADRSTGAMNLWAHDRAASVGKDGLIRGIGVKTALSVEKFNVDVLGRIYLAPPETRSGLA

SEQ ID NO: 82 - protein, 1122 aa, Streptococcus suis
MSNGKILGLDIGIASVGVGVIDAQTGEIIHASSRIFPSANAANNAERRTFRGSRRLIRRKKHRIKRLDDLFNDFHINLDGEMSTDNPYVLRVKGLSQKLTVEELYISIKNIMKRRGISYLDDAESDNEAGRSDYAKAIERNRQLLTSKTPGEIQLERLEKYGQLRGNFTIIDEEGQSQQIINVFSTSDYVKEVEKILDCQKMYHKFISDEFCDKLIELLREKRKYYVGPGNEKSRTDYGIYRTDGTTLENLFGILIGKCTFYPDQYRSSRASYTAQEFNFLNDLNNLTVPTETKKLSQEQKEFLVNYAKETSVLGAGKILQQIAKLADCKVEDIRGYRLDNKDKPELHTFETYRAMKGLVPLVDIGVLSREQLDILADILTLNTDFEGIREALKKQLPNVFDEKQVKGLASFRKSKSQLFAKGWHNLSQKIMLEVIPELYATSDEQMTILTRLGKFEKSSVAEYPSSINVDEITDEIYNPVVAKSIRQTIKIINASIKKWGEFDQIVIEMPRDRNEDEEKKRIADGQKANAKEKADSILRAAELYCAGKVLPDYVYNGHNQLATKIRLWYQQGERCIYTGQPISIHDLIHNQNQYEIDHILPLSLTFDDSLSNKVLVLATANQEKAQRTPYNYLKSATSAWSYREFKDYVTKRKGIGKKKCEYLTFEEDINGFEVRSKFIQRNLVDTRYASKVILNALQDYFKISGIQTKVSVVRGQFTSQLRHKWGIEKTRETYHHHAVDALIIAASSQLRLWKKQESPLVVDYQEGRQVDLETGEILELTDEQYKELVYQPPYQGFVNTISSSAFDNEILFSYQVDSKVNRKISDATIYATRNAQLGKDKTEGIYVLGKIKDIYTQAGYEAFLKRYTKDKTSFLMYHKDLDTWEKVIEIILRDYREYDEKGKEIGNPFERYRRENGYVKKYSRKGNGTAIKSLKYYDNKLGNHIDITPENSRNAVVLQSLKPWRTDVYFNKETGKYEFLGIKYSDLSFEKGTGEYGISQEKYDSIKIAEGVAKKSIFKFTLYKQDLLFIKDIENNFGKLLRFTSKNDTSKHYVELKPYDKNKFGTEEPLLPVLGNVAKSGQCIKGLNKSNISIYKVRTDILGYRHFIKQEGEHPQLKFKK

SEQ ID NO: 83 - protein, 1509 aa, Bacteroides coprophilus
MKKTLGLDLGTNSIGWAVINSNIDSEGKEKLVGISSCGSRIIPMDATTLGDFGKGNTKSPVAERTRLRGIRRLLERSLLRRERLHRVLSVMGFLPEHYASQLDRYGKFLPETEPKLAWYKDDSGRYQFLFQKSFHEMLEDFRQHQPELVAGEKKIPYDWTIYYLRKKALSQEITKEELAWILLNFNQKRGYYQLRGEEEQEENNKSVEYHALKVVSVEDSGERKGKDIWYNVTLENGWVYRRASNIPLDWTGKVKEFVVTTELDDAGNPKKDKEGNVKRSFRAPKEDDWGLLKTRTQAQIDESGKTVGTYIYESLLCMPNQKIRGKLVRTIERKYYKDELRQILVKQSEFHAALQDHNLLLSCIEELYPNNEAHRRLLSASSFIYFLIEDILFYQRPLKSQKGLIDNCPYESHIYKDKKDGSLHHVPLKCVSKSHPLFQEFRLWQFLSNLRIYQRERMMDGSLKLDVDVTREFLPSEEDYVKLFDWLNERKEISQKFLLAYKPFGLKKNEQANYRWNYVEDKSYPCNETRAEIKSRLSKAGVPEEFLTEEKEEALWHILYSISDKKELTKALGTFAAKNCLNESFVEVFAKIPPFESNYAAYSLKAIRKLLALMRMGKYWNEQAIDRQTRDRIEKILTGEYDETIRSRVREKAMLLTDISSFRGLPLWLACYIVYDRHSESKELVKWETPADIDHFLSKFKQNSLRNPIVEQVITESLRTVRDIWKQEGKIDEIHVELGREMKNPAKERARITAQVQENENTNLRIKALLAEFMNPEFEIENVHPYSPGQQEILRIYEDGVLSGIAEKDLPDDITAILKKFRENDVKKRPTTSEVLRYKLWLEQRYRSPYTGRVIPLGKLFTPAYEIEHVIPQSRYFDDSISNKVICESAVNKLKDNCLGYEFIKKHSGEMVELGNGETVPVFSVEEYERFVKESYFGNSKKMKKLLLEDIPDSFIERQLNDSRYISRVVTSLLSNLVCEEGEQDGLSKNVIVCTGGITDRLKKDWGVQEVWNRIILPRFLRLNEITGRTDFTSTSVNGHLLPALPLYLQKGFNKKRIDHRHHAMDAIVIACANRNIVNYLNNSSARKNSEISRYDLQRLLCEKVKTDANGNYKWILRKPWETFTQDVYAALTNIVVSFKQNLRVINRTTNYYQHYNEAGEKRMIPQTKGDRWAIRKPMHKDTVYGEVNLRKEKTLPLRDVVKNPSIVVDKSLKNKLYELLKSQYDLKAIAKYFETHQDVWADVNLKKIKVYYFTKETNERFFATRKSLDPSFDQKKIEEEVTDTGVQKILLHHLQQNNNDPDMAFSPDGIDRMNQNMTILNDGKWHQPIYKVRTYEKADKFAVGESGNKAKKFVEAAKGTNLFFAVYESVQEDEAIGKQVCKRTFATIPLNEVIKRKKQGLPAAPEDLNGNLPKFVLSPNDLVYLPTEEERNSSRIIQPLDRERIYKMVSSSGSQCFFIKVFVANSIWDKNEYSSLNKMERAITNEMIKEICVPIKIDRLGNVSLIQI

SEQ ID NO: 84 - protein, 1219 aa, Bacteroides cellulosilyticus
MKEEVRGKNRSQTWAILAKFFVWSEKESVWNEKEARTEERVKEYKLVGLKRDTKGNELKLENYRWRVQALSEQLNPEIVAIVLQEINGQISASSGYLGAISDRSKQLYFNRQTVGQYLMSELEKDPNVSLRNRVFYRQDYLDEFDRIWEKQAEFHEELTVELKKEIRDIIIFYQRRLKSQKGLISFCEFEKREVVVEEDGRKKNKTVGCRVIPRSHPLFQEFKIWQTLNDIEVFAWDKQSKRKKADKSSILFDNSEDALLVEGKRFLYQEEKELLAKELFVKESMKKAEVLKLLFENYQELDLNFKQIDGNHTGFALFSAYSKMIEKYGYEPVDFKRSADEIIEKLETIFTNLGWNTELLSIDLSKEDKELERQSYFRLWHLLYSFEGDNTPTGNGKLLEKIMQLCDVEKEYAVELANVSFQEDYGSLSAKAIKKILPYLKEGNQYDVACDYAGYRHSRSSLTKDEIENKILKDKLEILPKNSLRNPVVEKILNQMVNLINTLIDTYGKPDEIRVELARELKKNAKEREELTKSIARNTREHDEIRQLLRTEFGMMNVSRNDIIRYKLYEELKDNGYKTLYSNEYIPREKIFSKEIDIEHVIPQARLFDDSLSNKTLEYRAINIEKGNKTAYDFVKEKYGNDGLEKFLNRCETLFKDKRTKLRKLKMEEKDIPEGFIDRDLRNTQYISKKAFAMLNEISRRVVATTGSITDKLREDWQLVDLMKELNLPKYEKLGMVEMFEDKDGRKIKKITDWTKRNDHRHHAVDALTVAFTKDVFIQFYNNKNAAWMPASKEHANITGIKARYFENGKALAPMPLAQFRAEAKRHLENLLVSIKAKNKVITSNVNRTKNKNGENRKLQQTPRGQLHLETVYGSHRQYATKIEKVNAAFDVTKIATVSKLAYRNALLKRLEAFGNDPKKAFTGKNTLEKNPLYLDENQTEMVPEKVQTVEFETVYTIRKPIDPNLSIDKVVDVKIRSVLEKRLKEYGGDAKKAFVNLDENPIWLNEAKGISIKRVSIRGISNAQSLHEKKDKDGNLILGKEGRKIPVDFVNTGNNHHVAIYKKPVLDKVGQVVLDEEGNPKYELDEVVVSFFDAVTRANLGQPIIDKDYRRSEGWQFLFSMKQNEYFVFPNDKTGFNPKEVDLLNPENYALISPNLFRVQKFAYKNYVFRHHLETTIKDTSSTLKGITWTDFRSSKGLDKIVKVRVDHIGQIVSIGEY

SEQ ID NO: 85 - protein, 1329 aa, Catenibacterium mitsuokai
IVDYCIGLDLGTGSVGWAVVDMNHRLMKRNGKHLWGSRLFSNAETAANRRASRSIRRRYNKRRERIRLLRAILQDMVLEKDPTFFIRLEHTSFLDEEDKAKYLGTDYKDNYNLFIDEDFNDYTYYHKYPTIYHLRKALCESTEKADPRLIYLALHHIVKYRGNFLYEGQKFNMDASNIEDKLSDIFTQFTSFNNIPYEDDEKKNLEILEILKKPLSKKAKVDEVMTLIAPEKDYKSAFKELVTGIAGNKMNVTKMILCEPIKQGDSEIKLKFSDSNYDDQFSEVEKDLGEYVEFVDALHNVYSWVELQTIMGATHTDNASISEAMVSRYNKHHDDLKLLKDCIKNNVPNKYFDMFRNDSEKSKGYYNYINRPSKAPVDEFYKYVKKCIEKVDTPEAKQILNDIELENFLLKQNSRTNGSVPYQMQLDEMIKIIDNQAEYYPILKEKREQLLSILTFRIPYYFGPLNETSEHAWIKRLEGKENQRILPWNYQDIVDVDATAEGFIKRMRSYCTYFPDEEVLPKNSLIVSKYEVYNELNKIRVDDKLLEVDVKNDIYNELFMKNKTVTEKKLKNWLVNNQCCSKDAEIKGFQKENQFSTSLTPWIDFTNIFGKIDQSNFDLIENIIYDLTVFEDKKIMKRRLKKKYALPDDKVKQILKLKYKDWSRLSKKLLDGIVADNRFGSSVTVLDVLEMSRLNLMEIINDKDLGYAQMIEEATSCPEDGKFTYEEVERLAGSPALKRGIWQSLQIVEEITKVMKCRPKYIYIEFERSEEAKERTESKIKKLENVYKDLDEQTKKEYKSVLEELKGFDNTKKISSDSLFLYFTQLGKCMYSGKKLDIDSLDKYQIDHIVPQSLVKDDSFDNRVLVVPSENQRKLDDLVVPFDIRDKMYRFWKLLFDHELISPKKFYSLIKTEYTERDEERFINRQLVETRQITKNVTQIIEDHYSTTKVAAIRANLSHEFRVKNHIYKNRDINDYHHAHDAYIVALIGGFMRDRYPNMHDSKAVYSEYMKMFRKNKNDQKRWKDGFVINSMNYPYEVDGKLIWNPDLINEIKKCFYYKDCYCTTKLDQKSGQLFNLTVLSNDAHADKGVTKAVVPVNKNRSDVHKYGGFSGLQYTIVAIEGQKKKGKKTELVKKISGVPLHLKAASINEKINYIEEKEGLSDVRIIKDNIPVNQMIEMDGGEYLLTSPTEYVNARQLVLNEKQCALIADIYNAIYKQDYDNLDDILMIQLYIELTNKMKVLYPAYRGIAEKFESMNENYVVISKEEKANIIKQMLIVMHRGPQNGNIVYDDFKISDRIGRLKTKNHNLNNIVFISQSPTGIYTKKYKL

SEQ ID NO: 86 - protein, 1152 aa, Roseburia inulinivorans
MNAEHGKEGLLIMEENFQYRIGLDIGITSVGWAVLQNNSQDEPVRITDLGVRIFDVAENPKNGDALAAPRRDARTTRRRLRRRRHRLERIKFLLQENGLIEMDSFMERYYKGNLPDVYQLRYEGLDRKLKDEELAQVLIHIAKHRGFRSTRKAETKEKEGGAVLKATTENQKIMQEKGYRTVGEMLYLDEAFHTECLWNEKGYVLTPRNRPDDYKHTILRSMLVEEVHAIFAAQRAHGNQKATEGLEEAYVEIMTSQRSFDMGPGLQPDGKPSPYAMEGFGDRVGKCTFEKDEYRAPKATYTAELFVALQKINHTKLIDEFGTGRFFSEEERKTIIGLLLSSKELKYGTIRKKLNIDPSLKFNSLNYSAKKEGETEEERVLDTEKAKFASMFWTYEYSKCLKDRTEEMPVGEKADLFDRIGEILTAYKNDDSRSSRLKELGLSGEEIDGLLDLSPAKYQRVSLKAMRKMQPYLEDGLIYDKACEAAGYDFRALNDGNKKHLLKGEEINAIVNDITNPVVKRSVSQTIKVINAIIQKYGSPQAVNIELAREMSKNFQDRTNLEKEMKKRQQENERAKQQIIELGKQNPTGQDILKYRLWNDQGGYCLYSGKKIPLEELFDGGYDIDHILPYSITFDDSYRNKVLVTAQENRQKGNRTPYEYFGADEKRWEDYEASVRLLVRDYKKQQKLLKKNFTEEERKEFKERNLNDTKYITRVVYNMIRQNLELEPFNHPEKKKQVWAVNGAVTSYLRKRWGLMQKDRSTDRHHAMDAVVIACCTDGMIHKISRYMQGRELAYSRNFKFPDEETGEILNRDNFTREQWDEKFGVKVPLPWNSFRDELDIRLLNEDPKNFLLTHADVQRELDYPGWMYGEEESPIEEGRYINYIRPLFVSRMPNHKVTGSAHDATIRSARDYETRGVVITKVPLTDLKLNKDNEIEGYYDKDSDRLLYQALVRQLLLHGNDGKKAFAEDFHKPKADGTEGPVVRKVKIEKKQTSGVMVRGGTGIAANGEMVRIDVFRENGKYYFVPVYTADVVRKVLPNRAATHTKPYSEWRVMDDANFVFSLYSRDLIHVKSKKDIKTNLVNGGLLLQKEIFAYYTGADIATASIAGFANDSNFKFRGLGIQSLEIFEKCQVDILGNISVVRHENRQEFH

SEQ ID NO: 87 - protein, 686 aa, Coprococcus comes
MKKQDSPKNNMGYTAYNLNVLGYEEFAKRVELLFKDTDAVKRLNDSHMQMAEGFDLNALPGSPALRRGVSQAIKVLDDIVSVAGKAPDRIYLKVTRTASNSRKGKRTAKRSDKIKQALKALDADAAADLGAAKLLRELGMFDEKEINERIYLYFHQAGKCLYTGKPIDITRIASNDYYVDHVVPLAYRKDESLDNKVLVYAEASRYKSETLLVSPAVQRKMLPFWRMLRNAGLMSERKLNALIRTEISEGMLKSIIGRQFTENSWEAKLFTAAIAAKYPGTVVIPVKAGVIGAVRSRIGIPKSLKANQFYHAHDALLAAEVGRYMELAKPAFVHNRVKYEQYMRKIKLVNEENKKAPKSQLDFFAGGFFFDRVDKDTGEVYWNKDEEVERIYRACGWKNLRVTYAAFEDGGAFWKQTIYSPREKSKLIATKSDRPAEIYGGYSSQTFANFFVYEVMKKKVKQLRFGAVPAAIASKSDPDTYNAMLEMYARGLAKTAKEKFVRIVRARVLKNTMIELYGERFRIAGEKQVYPVRQMPLAIDEVYLLKGVETIAAAGNAGASAKIDFEKAAESLVGFWDLLLEKLPVNYPKLTVQLKLGLLKHPKDILAATSESEFPAIVYKIAEAEIQVMEQASGLRNMSDTKILGGNTFGGSLVFTFNKVLNDPKSKACFIDTTPAGLYEVKTKIW

SEQ ID NO: 88 - protein, 1105 aa, Actinomyces coleocanis
MDNKNYRIGIDVGLNSIGFCAVEVDQHDTPLGFLNLSVYRHDAGIDPNGKKTNTTRLAMSGVARRTRRLFRKRKRRLAALDRFIEAQGWTLPDHADYKDPYTPWLVRAELAQTPIRDENDLHEKLAIAVRHIARHRGWRSPWVPVRSLHVEQPPSDQYLALKERVEAKTLLQMPEGATPAEMVVALDLSVDVNLRPKNREKTDTRPENKKPGFLGGKLMQSDNANELRKIAKIQGLDDALLRELIELVFAADSPKGASGELVGYDVLPGQHGKRRAEKAHPAFQRYRIASIVSNLRIRHLGSGADERLDVETQKRVFEYLLNAKPTADITWSDVAEEIGVERNLLMGTATQTADGERASAKPPVDVTNVAFATCKIKPLKEWWLNADYEARCVMVSALSHAEKLTEGTAAEVEVAEFLQNLSDEDNEKLDSFSLPIGRAAYSVDSLERLTKRMIENGEDLFEARVNEFGVSEDWRPPAEPIGARVGNPAVDRVLKAVNRYLMAAEAEWGAPLSVNIEHVREGFISKRQAVEIDRENQKRYQRNQAVRSQIADHINATSGVRGSDVTRYLAIQRQNGECLYCGTAITFVNSEMDHIVPRAGLGSTNTRDNLVATCERCNKSKSNKPFAVWAAECGIPGVSVAEALKRVDFWIADGFASSKEHRELQKGVKDRLKRKVSDPEIDNRSMESVAWMARELAHRVQYYFDEKHTGTKVRVFRGSLTSAARKASGFESRVNFIGGNGKTRLDRRHHAMDAATVAMLRNSVAKTLVLRGNIRASERAIGAAETWKSFRGENVADRQIFESWSENMRVLVEKFNLALYNDEVSIFSSLRLQLGNGKAHDDTITKLQMHKVGDAWSLTEIDRASTPALWCALTRQPDFTWKDGLPANEDRTIIVNGTHYGPLDKVGIFGKAAASLLVRGGSVDIGSAIHHARIYRIAGKKPTYGMVRVFAPDLLRYRNEDLFNVELPPQSVSMRYAEPKVREAIREGKAEYLGWLVVGDELLLDLSSETSGQIAELQQDFPGTTHWTVAGFFSPSRLRLRPVYLAQEGLGEDVSEGSKSIIAGQGWRPAVNKVFGSAMPEVIRRDGLGRKRRFSYSGLPVSWQG

SEQ ID NO: 89 - protein, 1361 aa, Anaerococcus tetradius
MGNYYLGLDIGTNSVGWAVTDENYNIERFKKKNMWGIRLFDEAKTAESRRIHRQARRMRQRKIQRLNLLMELFDVEISKVDESFFIRKKESDLHYEDKSQDSRYALFNDKEFNDKDYHNKYPTIFHLIMDLIENDEKKDIRLLYLACHYLIKNRGHFIFEGQKFDVNSSLNNNINKLKSHLDQFYNICLDFDNDKLIEILVNQNLNISEKSKKIKELLRKTNLEVGIANLIAGGSIKLSNMFDDDELKNLDYNSLSFKNSNFDEGRELFEEVLEDRFELVEILKDIHDASVLETMLSSASISPDGGKYISSSMINSYNKHKRDLKLLKKIIKKYKKSEYDNIFRDENIKNNYLSYTRTGINKNKKVQAEDNTDSDGFYKYIVKILKDIKENDSDEDIKYILSEIDKKNFVPKQRTKENSVIPYQLREIELRKIIDNQSKYHKFLNEVDEKGISVKEKIISLLTFRIPYYIGPLNPSYNEEKNFTTSWVKRLAKGKVTPWNFEDMVDIDASREAFIENKLNKCSFLLDETVLPKDSLLYQEYMVLNELNNLKINGQSINTDLKKSIYEELFKKYKKVTRKRLISYIKEKENMSGDIVITGIDGDFKQGLKSYIAFKDIIGEKIDDDIYRKEVEKIIRDISLYGDDKSFIQKKIKNENKLDLSDDQISKIAKLKFKDWGRFSKKLLVGIKASDKNTGEIDNIIGFMRNYNYNIMQLMANVFTFKDEIEKLNSKYYTDEKINIDYLDDLYLSSPAKRMLWQSFQIVDEIKNIKNSDPKKIFIEMARSKEDKPTRKMSRKSRLEKLYTDSKKQFIKLFGPDEYDKLNNEIKNKSESDFRWDNLYLYYTQFGRCMYSLDPIDLEELSNKNLYDQDHIYPKSKIYDDSIENRVLVKKQLNLDKSNEYPIPDRVLNKDKNKLLAFWKMLNEKELIGDKKYARLIRKSPFTDEELGDFIARQLVETRQATKETANMLKRLCPDSKIVYVKAKNVSDFRRKFDILKCRSINDLHHAHDAYLNIVVGNVFDTKFTSNPLNFIKNNSKNRSYNLEKIYDYDVIRNEKIAWLAERKEENQDGSIATVLKNLSKNDIRVTRRTYIKCEDLFDENIVRKGNGKFPIKENNNKSDTNKYGGYSGIKNAYFVLLEDEKHNRILEAIPSFIYKKEKNGEKGSVINYLQNILGIKSAKILRDKIKIGSLLKIDKFPYNLAGKSGNGILISGGVQLILDKNTSKYIKKIENYKYKLDENKDYQINIFDKLSKEENIKLFDLFVDKFENSIYKNRVNIKLKEIKLARPKFEHLSIEEQIKTLTQMLILFGRENNAVNLEYIGLPKNTGKTKINKKINNKDIKIINQSITGLYETEEDLANI

SEQ ID NO: 90 - protein, 1377 aa, Lactobacillus brevis
MESNHDGEQVKYTLGLDIGTSSIGYAAIDKHQKPIRAKGKHVIGVRLFQEGQTAADRRAFRTTRRRLKRRKWRLNLLNRLFDPYLSEVDPNFLPRLRQSNLSPKDDNKHFNGSTLFPDKTDAAFYRQYPTMYHLRYALMTEKRKFDIREVYLAIHHIVKYRGNFLNSATVDSFKTSNIDFTSQFDRLNELYRQVILDEPFQINMDQVDEMTNKLLDNDALKLDTQKQVAKLLPVIYNDKPIDKQYTRIATEFSKAILGYKTKLDVILNLDTQNAKDWVIRLDDEDIDDKLPALVENLDESRQEIVTIIRDLYAQITLNAIVPKGKSLSESMVDKYNDHKDHLDLLMGLIHELGDDSAKGIKLREAYTQYVGKSDDKTLNQDDFYAAIKKNLDEDSKRSPKIQRLIEQASFMPKQRTSANGVIPHQLHQLELDRIIENQGRYYPFLKKPNPNTHKPNGGKYKLDELVAFRIPYYVGPLITKRDQEKTSGADFAWMIRKPGQEGEITPWNFDQKVDRMASANRFIRRMTTKDSYLVAEDVLPDASLIYEKFKALNELNMLKVNDSRLSPSQKQDLFNNLFKKQKTIRTKKLQTYIRTNWELPSVMISGLADPDKFNSSLSTYIDFRDIFGEKVDDPNRQADYEEIIEWSTVFEDRKIYQAKLNQLDWLTEPQRKALLTKRYTGWGRLSKKLLTGLKDQNGDSILDQLWKTNDNFMQIQSRDEFAKQIHDENAKQFHEANNVDDILDDAFTSPQNKKAIRQVDKVVQDVVKAVGYAPDKIAIEFTRSLENNPQRTVSRQRQLQAAYKNIPREIMKSGLMAELGSVADSKKVLSDKLYLYFTQMGKDMYEDKTINIDNLPNYDIDHILPQAFIKDDSIDNRVLISKEENARKSNRVPLKFFGAKRMGFWKDLLNNGLISNRKFQNLTTDPEKISKYSAKGFIHRQLVETSQVIRLVANILGNEYSQAGTTIIEVSAKMNRQLREDFHLIKNRNVNDYHHAMDAYLTAYVGDYLYLRYPKLRPYFVYGDFKKAEDQDLNIRNFNFLHDLKDNESLDKIVDSETGEIVWEKHGSVKQLKKVYHYKFMLVSQEVYTRQDALFNQTIYPASDADKRKLIPIKNSKPVDVYGGYSGNIDAYMAIVRVHGKKEDNYKVVGIPMRAVTKLKKAEKEGHDSYLNAVHEVLKPQFTKKKKNRKTGEITETVDEFDVLLGKVYYRQLIVDGNKKFMLGSSSYQYNAKQLVLSDKAMQVLSKNGKVKSQDENQNLIDVYDEILEKVDQYFELYDQRHYRESLHKGRGIFVNLPLSNQYDGSKLTSYGKYETIDAILNGLHANATMSNLRYLGISSPFGKMQASNGLTIDPDSIICYQSPTGLFERQIKLSDL

SEQ ID NO: 91 - protein, 1239 aa, Lactobacillus buchneri
MTEKRKFDIREVYLAIHHIVKYRGNFLNSATVDSFKTSNIDFTSQFDRLNELYRQVILEEPFQINMNQVDKMTNKLLDNDALKLDTQKQVAKLLPVIYNDKPVDKQYTRLATEFSKAILGYKTKLDVILNLDTQNAKDWAIRLDDEDIDDKLPALVENLDESRQEIVTIIRDLYAQITLNAIVPKGKSLSESMVDKYNDHKDHLDLLMGLIHELGDDSAKGIKLREAYTQYVGKSGDKTLNQDDFYAAIKKNLDEDSKRSPKIQRLIEQASFMPKQRTSANGVIPHQLHQLELDRIIENQGRYYPFLKEPNSNTHKPNGGKYKLDELVAFRIPYYVGPLITKQDQEKTSGADFAWMIRKPGQGGEITPWNFDQEVDRMASANTFIRRMTTKDSYLVAEDVLPDSSLIYEKFKVLNELNMLKVNDRRLSISQKQDLFNNLFKKQKTIRTKKLQTYIRTKWELPSVMISGLSDPDKFNSSLATYIDFRDVFGEKVDDPNRQADYEKIIEWSTVFEDRKIYQAKLNQLDWLTESQSKALLTKHYTGWGRLSKKLLTGLKDQNGDSILDQLWKTNDNFMQIQSRDEFAKQIHDENAKQFHEANNVDDILDDAFTSPQNKKAIRQVDKVVQDVVKAVGYAPDKIAIEFTRSPQDRPQRTFSRQRQLQSTYLNVAKALMKSNLNQELKSVIDSQQTLTDKLYLYFTQLGQDMYTGKEINFDELVNYQIDHILPQAFIKDDSLDNRVLVSAPINNAKSDNVPVKKFGAKMGYFWKQLAENHLISKRKLNNLTTDPDKIGKFTAQGFIHRQLVETSQVIRLVANILGNEYGHDGTTIIEVTAKMNHQMRKDFDLIKIRDVNDYHHAMDAYLTAYVGDYLYLRYPKLRSYFVYGDFKKLKDQSLKIRNFNFLHDLTNDEAGDKIVDQETGEIIWDKHESVKQLKKVYHYKFMLVSQEVYTRQDALFNQTIYPASDADKRKLIPIKNNKPVDVYGGYSGNVDAYMAIVRIHGKKEDKYKVVGVPMRAVADLKKAESKGRDNYLNAVHEVLKPQFTKKKKDRKTGEITEMMDDFDVLLGKVYYRQLIVDGNKKFMLGSSTYQYNAKQLVLSDKAMQVLSKDDKLKNQDENQNLIDVYDEILEKVDQYFELYDINKFRQKLHDGRKKFIELPVDNDFNGKKLISYGKRATIISILNGLHANATMSNLKYLGISSPFGMLQVPNGIILSPASRICYQSPTGLFERKVKLSDL

SEQ ID NO: 92 - protein, 1381 aa, Lactobacillus fermentum
MDYVKEYHIGLDIGTSSIGWAVTDSQFKLMRIKGKTAIGVRLFEEGKTAAERRTFRTTRRRLKRRKWRLHYLDKIFAPHLQEVDENFLRRLKQSNIHPEDPAKNQAFIGKLLFPDLLKKNERGYPTLIKMRDELPVEQRAHYPVTNIYKLREAMINEDRQFDLREVYLAVHHIVKYRGHFLNNASVDKFKVGRIDFDKSFNVLNEAYEELQNGEGSFTIEPSKVEKIGQLLLDTKMRKLDRQKAVAKLLEVKVADKEETKRNKQIATAMSKLVLGYKADFATVAMANGNEWKIDLSSETSEDEIEKFREELSDAQNDILTEITSLFSQIMLNAIVPNGMSISESMMDRYWTHERQLAEVKEYLATQPASARKEFDQVYNKYIGQVPKEKGFDLEKGLKKILSKKENWKEIDELLKAGDFLPKQRTSANGVIPHQMHQQELDRIIEKQAKYYPWLATENPATGERDRHQAKYELDQLVSFRIPYYVGPLVTPEVQKATSGAKFAWAKRKEDGEITPWNLWDKIDRAESAEAFIKRMTVKDTYLLNEDVLPANSLLYQKYNVLNELNNVRVNGRRLSVGIKQDIYTELFKKKKTVKAGDVASLVMAKTRGVNKPSVEGLSDPKKFNSNLATYLDLKSIMGDKVDDNRYQMDLENIIEWRSVFEDGEIFADKLTEVEWLTDEQRSALVKKRYKGWGRLSKKLLTGIVDENGQRIIDLMWNTDQNFMQIVNQPVFKEQIDQLNQKAITNDGMTLRERVESVLDDAYTSPQNKKAIWQVVRVVEDIVKAVGNAPKSISIEFARNEGNKGEITRSRRTQLQKLFEDQAHELVKDTSLTEELEKAPDLSDRYYFYFTQGGKDMYTGDPINFDEISTKYDIDHILPQSFVKDDSLDNRVLVSRAENNKKSDRVPAKLYAAKMKPYWNQLLKQGLITQRKFENLTMDVDQNIKYRSLGFVKRQLVETRQVIKLTANILGSMYQEAGTDIIETRAGLTKQLREEFDLPKVREVNDYHHAVDAYLTTFAGQYLNRRYPKLRSFFVYGEYMKFKHGSDLKLRNFNFFHELMEGDKSQGKVVDQQTGELITTRDEVAKSFDRLLNMKYMLVSKEVHDRSDQLYGATIVTAKESGKLTSPIEIKKNRPVDLYGAYTNGTSAFMTIIKFTGNKPKYKVIGVPTTSAVGLKRVGKPGSESYNQELHRIIKSNPKVKKDFEIVVPHVSYSQLIVDGDCKFTLASDTYQHPATQLVLSKESMEIIADDFKFVKENPATADEQLVRVFDEIVNQMNHYFTIFDQRSNRQKVTKARDKFVSLPTESEYEGAKKTQVGKTEVITNLLMGLHANAAQGDLKVLGLSTFGFFQSSGGLNLSEDAMIVYQSPTGLFERRICLKDI

SEQ ID NO: 93 - protein, 1306 aa, Sphingobacterium spiritivorum
MKHILGLDLGTNSIGWALIKQNFENKQGEILGMGSRIIPMGAELSKFEQGQAQTKNANRRIARGTRKLNKRYKQRRNKLIYILQGLGMLPDQIKLVNQFSDPNKLDKISILPISKNQQQLTAFDLLELRVKALTEKIELEELGKVIYKYNQLRGYSGGNSEPEKEENNEDESEENEKTNDSFVVFSKVLSLGLPEEITFKGKKLSKRKIAIETEDGIIEAETFLDSLKENDSLELHVNIRRAKSGDTITIKLPSKTSWRKKMENIEKQLADKSKELGREYFISELLFDILKENKWAKIRNNVILRSRYESEFDAVWSEQSKYYPILNHLETDRLQKILEFIFPGQKESQEKLRQTGLKEGLKYVIKNQVVFYQRELKDQSDLISNCRYEPTEKVVAKSHPVFQEYKIWEQINKLVINTKIENGVNRKGEIRYKYIDKPIPVALKEWLYEELQSKKEVSFNPILTKLKKEFKLRENVDFLNGMNAKDKLKGNETKVILQKALGELWNIFGLDDSERQVELWEILYNGKGNEYDLTSERTSNILAFIEKYSPDLENKNDVAIKISKIKFSRNYSNLSLKAIDNILPLVRAGKFFDQNFSEALSHKIVKLLNENVEDPFEKSAQEFLDKNQDVLSDGGIVNAIATILVYDKHTAKEYSGDELIKEFTQISRLKQGELRNPLAEQIINEALVIVRDIWRKYGFKPDEIRVELARELKNNAVERGKMYSANLKSQKHNAEIRNKLIELKQEISIANIEKYKLWVSQENLQEVYLKNYNDPSKSEIEKLKLWESQGHISPYTGQPISLSELFNRERYDVDHIIPQSRYFDDSLSNKVICEKSINNEKGNRTSMEYFEVGSVNYRIFTKDQFIDHANKYFSGKKRKNLLATSIPEDPIQRQIKDTQYISIRIREELNKIVGNENVKTTTGGITDYLRNHWGLTDKFKVLLKERYEAVLPKIAQLEYDNYKKETEKKFTEYKNADVEFNEPILDEEIFIEKFRSEFIRKKNNKLIIKGWSKRIDHRHHAMDALVIACTQPAHIKRLNDLNQVLKEWLDKNKEKFFPGFSGTKTELLDEVLNLEEEKRREIFNQLEKFRAIEMPWKGFPEEAEQKLKEVIVSHKPKDKLLLQYDIQGNKQIKLRGQLHEGTLYGLSNGKEIYRIPINKLAGKQFATEKTIEKIVNPFLKNVIEEHLKSFGKKEEAFSAEGILDLNKKLAERKDEQQNPKPHPPISTIKIYYKDPSKSKKKKTDDEDDISLQKLNRKKSFNDSLYVKTGDNYLFAVMEKEVFNKKLNKDKTERHYDLKLFLTLLIF

SEQ ID NO: 94 - protein, 1358 aa, Unknown
  Acidaminococcus sp.D21
MGKMYYLGLDIGTNSVGYAVTDPSYHLLKFKGEPMWGAHVFAAGNQSAERRSFRTSRRRLDRRQQRVKLVQEIFAPVISPIDPRFFIRLHESALWRDDVAETDKHIFFNDPTYTDKEYYSDYPTIHHLIVDLMESSEKHDPRLVYLAVAWLVAHRGHFLNEVDKDNIGDVLSFDAFYPEFLAFLSDNGVSPWVCESKALQATLLSRNSVNDKYKALKSLIFGSQKPEDNFDANISEDGLIQLLAGKKVKVNKLFPQESNDASFTLNDKEDAIEEILGTLTPDECEWIAHIRRLFDWAIMKHALKDGRTISESKVKLYEQHHHDLTQLKYFVKTYLAKEYDDIFRNVDSETTKNYVAYSYHVKEVKGTLPKNKATQEEFCKYVLGKVKNIECSEADKVDFDEMIQRLTDNSFMPKQVSGENRVIPYQLYYYELKTILNKAASYLPFLTQCGKDAISNQDKLLSIMTFRIPYFVGPLRKDNSEHAWLERKAGKIYPWNFNDKVDLDKSEEAFIRRMTNTCTYYPGEDVLPLDSLIYEKFMILNEINNIRIDGYPISVDVKQQVFGLFEKKRRVTVKDIQNLLLSLGALDKHGKLTGIDTTIHSNYNTYHHFKSLMERGVLTRDDVERIVERMTYSDDTKRVRLWLNNNYGTLTADDVKHISRLRKHDFGRLSKMFLTGLKGVHKETGERASILDFMWNTNDNLMQLLSECYTFSDEITKLQEAYYAKAQLSLNDFLDSMYISNAVKRPIYRTLAVVNDIRKACGTAPKRIFIEMARDGESKKKRSVTRREQIKNLYRSIRKDFQQEVDFLEKILENKSDGQLQSDALYLYFAQLGRDMYTGDPIKLEHIKDQSFYNIDHIYPQSMVKDDSLDNKVLVQSEINGEKSSRYPLDAAIRNKMKPLWDAYYNHGLISLKKYQRLTRSTPFTDDEKWDFINRQLVETRQSTKALAILLKRKFPDTEIVYSKAGLSSDFRHEFGLVKSRNINDLHHAKDAFLAIVTGNVYHERFNRRWFMVNQPYSVKTKTLFTHSIKNGNFVAWNGEEDLGRIVKMLKQNKNTIHFTRFSFDRKEGLFDIQPLKASTGLVPRKAGLDVVKYGGYDKSTAAYYLLVRFTLEDKKTQHKLMMIPVEGLYKARIDHDKEFLTDYAQTTISEILQKDKQKVINIMFPMGTRHIKLNSMISIDGFYLSIGGKSSKGKSVLCHAMVPLIVPHKIECYIKAMESFARKFKENNKLRIVEKFDKITVEDNLNLYELFLQKLQHNPYNKFFSTQFDVLTNGRSTFTKLSPEEQVQTLLNILSIFKTCRSSGCDLKSINGSAQAARIMISADLTGLSKKYSDIRLVEQSASGLFVSKSQNLLEYL

SEQ ID NO: 95 - protein, 653 aa, Oribacterium sinus
MELINSEEFTFKEELEKHTQVAMKQLSEFTYEDLEDSYFSVPVKRMIWQTLLVVREIEKVMGYAPKRIFVEMTRTEEEKGDKGRKESRGNQLLELYKSIKNTDSHNWKEEIAAADKDGKLRSKKLFLYYMQMGRDMYTGEEIDLGRLYDDNLYDIDHIYPRHYVKDDSIMNNLVLVNRRANQDIKKDLYPIPEQIKANPNVHMLWDALHKQKLITDEKYARLTSNTAFSEKQLGDFIARQLVETGQGTKGVADLLEQLFKDTVIVYAKASNVSDFRRDNGFLKSRLVNDFHHAQDAYLNIVVGNVYYTKFTKNPWNFICKDYEKDKEKNRYNLARMFDWNVVRGSETAWIVERKDEKGTISTVRKMMQKNTPLLTRMNFEQHGSIANATLYSAKKAKSENYLPLKTADEKMSDVKKYGGYTSMSIAYYFIVHHKEDKKENVTIEALPLYCKDKVEREENGLEKYCEEVLGYGEVNIIRRKLKIQSLLEFNGYQVHLSGKTGNQLILRNAISLCLSTKWITYIKKLEKAVNIQIVEEVVTPEENIKLYNLLADKHANTVYSKRPNAYGEKLLADREIFVTLEFGKQCEALLQILSLTKIGSTEANLLLIGESEHSGKILISKNLKASDRPAVINQSPCGLYEKKEWIFDKIVEK

SEQ ID NO: 96 - protein, 1436 aa, Capnocytophaga gingivalis
MKYIKYILGLDIGSNSIGWALIQLDLLQKTKRIIAAGSRIIPMDQKVLSDFGKGITISPTAQRTSYRNARHCRERHLLRRERLHRVLHILGFLPTHYDKQIDFSKRYGKFVDNTEPKIAYNEGKFLFMDSFQEMLSDFKSHQPDLFYTKKNGEESKIPYDWTIYYLRKKALSQKISKEELAWIILNFNQKRGYYQLREEEGNKENDFEIISSKIISVIKKDKDKKYNKYWYDIILENGLVYQAAFYNDFVYNWINQDREFIIERTSLKNGAEKVKLSYLPTFDEIDKMDKKEQDKYYKKIKIKTENSIGNKTVGCYIYDHILQNPNEKIKGKLVRTIERKYYKEELKAILEKQIALQPELFTDQLLADCIRELYSKNEAQQRNLAARDFVHLLVEDIIFYQRPLRRQKSTLANCSLESRSYIDKDSHTRKEAPLKVCPKSNPYYQEFRVLQWLQNLKIYEIDSDQEVTHQFIKTLEDKQQLFEFLMAQKEIDCEELLKYFLNQTYPNAKEKALKSELKKWKDTYRWNYVYDIGEKSSKKYPMNETRYELKRHLEKVANLPDDFLSSEVEYLLWHLIYSVKDKVAYEKGLKKFAQKHHLDKDSFVESFKKFNPYPSEYGSFSEKAIRKLLPLMRFGAHWDFNHIDKNTQKRIEDLITGVENEEIRTILREKAEKYQLEKETDFQDLPLWLAQYIVYNRHAEASSLEKWTSVNDLETYLNEFKQHSLRNPIVEQVVMETLRVVRDIWQQYGQGQASFFNEIHIELGRELKKTAKEREKLSKQNQKNEDINLSIKEKLKELEKYNTRAYSITHQEKYKLWLEQKHISPYTGQIISPENLFTDNYEIEHIIPQSRFFDDSLSNKVVCESIVNKAPYKDRQLGLEFIKNQGGRIVKELSKENKTIKIFTEEQYRTFIKEHYSNNPEKTKKLLLEEIPEKMVARQMNDTCYISKFISEILSKIVRSDEQDEGVHSKNVILCTGKITSILRQDWGLNDIWDNLILPRFERMNNLLQKEKFTIYSIEKQKKIPVVPINDQFKSFQKKRIDHRHHAMDAIIIACTTREHINYINNQHALEKEKDKKEKQEERDKLREKLCIKKYNNRSEGNYSWIFKKPWDTFTQEVRVALEDIVVSFKQNLRVINKATNYYERWVEENGKYIKKMVKQEGTNWAIRKPLHEETISGKIYLDREKITKNDILTATRKTVDSSFDDKRIKKITDTGIQKILLNYLKYKGSPEIAFSPEGLEELNKNLSIYNDGKPHKPIYKVRIYEKGSGRFALGEKGRKYKKYVQGASNLYFGIYQGAKRSFATIPLNEVIERQKQGLPSVPEYNEKGDLLLFSLSPNDLVYVPIEGEIIENIDFRNLSKEQKERIYNVNDFSSTCYFTPNRIAKAIFPKEVDLQRKGDKLSGSYDTKTASLEGIQIKEVCIKLKVDRLGNISKA

SEQ ID NO: 97 - protein, 1069 aa, Bacillus cereus
MNYDIGLRIGITSCGWSIINKDLERIEDLGVRVFEKAENPDGTASAAPRREARKSRRKHRRKKHRIERIKRLIVQHDLLSKKELDSLYLSPFNIDVWNLQVEALERKLDNREFARVLIHLVQRRGFQTIRKSVEIQEEGKLLENVSENERIMKVNGYKTVGEMFSKHEKFTHHKRNKDGSYTSVVTRSLLLKEIKTIFNSQRILGNVFSTQKLESDYLYIWGSQRPTLTYEQLMSMVGNCIYEKKEKRAPKTSWAFQYFSLLQKINKLKVSDDNTLRKLSKEERDIVIELAFKKKNVSFVDIRKALKLNDNTKFNHLTYSHVVETKKVEKATFIELKGYHLIKKQLKDRNVELTQELQPKDYDAIAAASTFFKNDIEFRDYLRNQYLDSNGKRKSNIANKVFEDKVIAAVFELNFSKVCHLSFKSLYKLIPHLEKGLDYKEAILCAGYNFRDENKRDKKLFLPVIQQETNPVVHRALTQARKVINAIIREYGSPNTIRFVVANDLAKTYKQRKELESTLKKNRAENEKIKTKLLSMGIINPTGMDIVKYKLWYEQSGICLYTGRQMELSSLFKPGYSIVNHIIPYNRSFDDTYHNRVLTLTETKYEKGNKIPFEYFGAEETCWNEYEKRVSTSKKIHDKKREKLLIRNFDIEYENEMISNNVFDTHYIGSYFEKYIDEHLQFKKSTKKQKVFSIHGNMVAHLHSRWGFNKNSREIYLNHAVDAAIVAVLTDQLIRNIADYYRRDNILEQKGSLKFPEPWKSFSIELEARISPQVRDLIKKLNLDSYLDVDILHIKPVFISKKPRRKVNGEAHKSTIRSLIGINEIGKTVTCIKTRLEDIPFDENGDFPMYGKDTDKYTYTAIKERYLEFNKDKEKAFSTPLYKLKRNGEPGNQIKSVKIIDTRNIVNKVNQGKGIAYNSNIIRVDVFSRDQKYYVVPIYLRDFIKGSLPNKIITAAKGFMQWPETDNSYTFLFSIFPNDLIKVVPKEGKFIKAKNENKENINLTEILGYFKGLDSSTGAFTLESHDGSLLARGIGTKNLLLIEKYQVDVLGRYNKVGNEERQDIKIQQN

SEQ ID NO: 98 - protein, 1391 aa, Lactobacillus jensenii
MKEIKDYIIGLDIGTNSCGYVVTDKQNNILKLKGKTAIGARLFKEGEAAADRRAFRTTRRRLARRRWRLSLLEEIFDEEMNKVDPSFFRRLKESDYSPKDRRKQFNSIVFESSEADKAFYEKYPTIYHLRNALMHDNQKHDLREIFLAVHHIVKYRGNFLREDSVKAFKAAKFTLQGEDGIGPVDKLNDLLKEIYIEAAPELATDNLSKIEDIIKDKKLYKQDKLKQIANLLPKAVDSKDKAKLNKDIAKQVANALMGYMFRLDTLFSFTDVDVKDYKLKFSDANIDESLDALTSLLTDAQIEFVLELQSIYNTIVLNEIVPDGMSLSESMVKKYDDHKKDLKLYKEYIDSLSDQKKAKQLEAAYALYVNYRKADLLAAKKLFEKKKIGDKKFVDVISNFEVFGKFVSDNLDDSELANKIKARLDLGEFLPKQRTNQNGVIPYQLHQVELTQILEKQGKYYPFLITPNPVESHRNNAPYEISELVSFRVPYYVGPLIDNQSIKDKQNKNKFAWMVRQKQGQITPWNFEEMVDTTESANQFIKRMTRKDTYLLAEDVLPKSSLIYQKFMILDELNRIKIDGKKLTSKLKHDIFEKLFKKQKSINLDNLKNYLLAEGNIPGLIEGLSDGINFNNSFSTYIDYRNIFGDEIDNPNKQADFEKMIEWSTVFEDRKIFKRKLKEITWLTPEQIKQVSSKRYSGWGRLSKKLLTQITDENGVNILQRLWNEPETLTEVLANPVIKRKISEANSLFVQINKVENILDDAYTSPQNKKAIRQVIRVVDDIIAAAHGKKPSQIAIEFARSSQNKAKVPDTRKKQLDKIYNKISSEILDSSIKNELKNLKSNKYLSKDKLFLYFKQMGRDAYTGDKLSLDQLQNYDIDHIFPRSFIKDDSLDNRVLTQKPINAKKSDYGIPALEFGNKYVPDLGITVKEMWKLWQENGLISKSKLINLCTNPKKIGSKRASGFINRQLVETSQVIKLVAIILQAEFPDTEIIEVKALQNTTLRESFHLYKNRSVNDYHHAIDAYLTTIVGNYLYQVYPKLRPYFVYGQFKKFNQEKNIDILKRLKNFNFLRQLIFNTDDNIYISGTKEIVFNKKDIIHKLETAYGYKYMNISRECYQETSSLFNQTLYAHNSSVKNSLIPKKKGLPTEIYGGYSGNKDSFFVLVKIVKKRTNLYRIVGIPTRELAKLNSSNNYNQALNKIVESKLCLKETESFKILIKRLLYGTLIVDNGQKFRIGSFKEKHNVQQLVLQLKSMKYIKFYIDGGQNYFTDVERKKLEKQDRDKCLLYVFDDIMNVVNKRFTLFDMSKYEKDGDSLREKFNCLDFNDKVSILSDLLKAFHANSDRTSITKLKITNLGRHQAGKNGITLTTNAQIIYQSPTGLFERRIKIKDL

SEQ ID NO: 99 - protein, 1114 aa, Eubacterium rectale
MNYTEKEKLFMKYILALDIGIASVGWAILDKESETVIEAGSNIFPEASAADNQLRRDMRGAKRNNRRLKTRINDFIKLWENNNLSIPQFKSTEIVGLKVRAITEEITLDELYLILYSYLKHRGISYLEDALDDTVSGSSAYANGLKLNAKELETHYPCEIQQERLNTIGKYRGQSQIINENGEVLDLSNVFTIGAYRKEIQRVFEIQKKYHPELTDEFCDGYMLIFNRKRKYYEGPGNEKSRTDYGRFTTKLDANGNYITEDNIFEKLIGKCSVYPDELRAAAASYTAQEYNVLNDLNNLTINGRKLEENEKHEIVERIKSSNTINMRKIISDCMGENIDDFAGARIDKSGKEIFHKFEVYNKMRKALLEIGIDISNYSREELDEIGYIMTINTDKEAMMEAFQKSWIDLSDDVKQCLINMRKTNGALFNKWQSFSLKIMNELIPEMYAQPKEQMTLLTEMGVTKGTQEEFAGLKYIPVDVVSEDIFNPVVRRSVRISFKILNAVLKKYKALDTIVIEMPRDRNSEEQKKRINDSQKLNEKEMEYIEKKLAVTYGIKLSPSDFSSQKQLSLKLKLWNEQDGICLYSGKTIDPNDIINNPQLFEIDHIIPRSISFDDARSNKVLVYRSENQKKGNQTPYYYLTHSHSEWSFEQYKATVMNLSKKKEYAISRKKIQNLLYSEDITKMDVLKGFINRNINDTSYASRLVLNTIQNFFMANEADTKVKVIKGSYTHQMRCNLKLDKNRDESYSHHAVDAMLIGYSELGYEAYHKLQGEFIDFETGEILRKDMWDENMSDEVYADYLYGKKWANIRNEVVKAEKNVKYWHYVMRKSNRGLCNQTIRGTREYDGKQYKINKLDIRTKEGIKVFAKLAFSKKDSDRERLLVYLNDRRTFDDLCKIYEDYSDAANPFVQYEKETGDIIRKYSKKHNGPRIDKLKYKDGEVGACIDISHKYGFEKGSKKVILESLVPYRMDVYYKEENHSYYLVGVKQSDIKFEKGRNVIDEEAYARILVNEKMIQPGQSRADLENLGFKFKLSFYKNDIIEYEKDGKIYTERLVSRTMPKQRNYIETKPIDKAKFEKQNLVGLGKTKFIKKYRYDILGNKYSCSEEKFTSFC

SEQ ID NO: 100 - protein, 1362 aa, Lactobacillus paracasei
MTKLGKPYGIGVDIGSNSIGFAAVDENSHLIRLKGKTVIGARLFEEGKAAAKRRAGRTTRRRLSRNRWRLSFLRDFFESHITPTDPNFFMRQKYSEISPKDKARYKYEKRLFNDRTDAEFYQQYSTMYHLRNRLMTDPSRADVREIYFAIHHILKSRGHFLTPGDAKDFNTNDVALDEIFPALQDAYAQVYPDLGITFDEDKANEFKTILLNEIATSIDTQRALVKLLLAEEDDKDILKQQKQVLTEFAKAVVGLKTKLNLALGTEVDSSEATAWNFSLGQLDDKWAGIESAMTDEGTEILDQIRDLYRARLLNGIVPTGKTLSQAKVDDYTQHHEDLQLFKAYLKQLEDDGTAKAIRQLYDRYIDGDDAAPFLRENFVKALTKDVTAHPNTKSPELLERLAQPDFMLKQRNKANGAIPVQMQQRELDQIIKNQAVYYDWLAAPNPVEKHRKSMPYQLDELLNFRIPYYVGPLVTAKEQKAAQGGVFAWMVRKDPEGNITPYNFDEKVDREASANTFIQRMKTTDTYLIGEDVLPKQSLLYQRYEVLNELNNVRVNNEKLSIEQKQQVIRELFERHNSVTIKQFAENLRAHGDYAHIPEIRGLADEKRFLSSLSTYRQLKSLLPEAIDDPAKQADIENIIAWSTVFEDAAIFKTKLKEISWLGSEAITKLSNIRYRGWGQFSRKFLNGLTLGNGHTIIQELLLSTNNLMQILTDETLQKKMTELNADKLKTANINDAIDNAYTSPSNKKALRQVLRVVDDIKRAADGQDPSWLYVETADGGGTPGKRTRARQHQLQEIYANAAHELIDTAVRGELEDKISDKADFNDRLVLYFMQGGRDIYTGAPLNIDQLSSYDIDHILPQSLIKDNSLDNRVLVHAIINREKNATFASTIYAQKMNATWRQWHEAGLISGRKLRNLQMRPDQIDKYASGFVARQLVETRQIIKLTEQIVAAQYPDTKIIAVKAGLSHQLREELEFPKNRDVNHYHHAFDAFLAARIGTYLLKRFPNLQAFFTYGKFTKADVKKLRGFNFIRDITHAEDKIVAKDTGEVVWDKQRDVDELDRIYNFKRMLITHEVRFETADLFKQTVYGARDSKEAGGSKQLIPKKKGYPVDIYGGYFRENTAYLAVVKVTKKTETIFKVVKIATSQVAALNKARSRSTAEELSVLTELLKPKFSKVGKNGKITDTPFEVVLPRVPREQLFYNAKYGFFMVNSDTMFHNFQEIWVSRSDQKILQQIRKAKIDYPNVDQDLDNLFHNLADQIVKYFDLYSIAGFKEKISQSQNTFNDLAVDDTDQSVGKITVINELLKGAQANGMTGSLKVLKISTPFGFTQDKSGVLTKDSSIIYQSPTGLFERSVRLTDL

SEQ ID NO: 101 - protein, 1056 aa, Actinobacillus minor
MKALNYILGLDLGIASVGWAVVEIDQNELPIRLIDLGVRTFERAEVPKTGDSLALARRLARSSRRLVRRRAVRLLKAKRLLKQEGILQADDFHSSHLKPLPNNPWELRVKGLNHLLDRKEWAAVLLHLLKHRGYLSQRKNESKTDNKELGALLKGVSENRQLLQAQAFSTPAEIAIKKFQQEEGHIRNQRGAYSHTFDRNDLLAELRLLFQKQREFNNPYTSQSLEQAIAELLMWQKPALSGEAILKMLGKCTFEPSEYKAPKNSYSAEYFVWLTKLNNLRILENGADRGLTAEERQLLINQPFEKAKFTYAQARKLLELSDLAIFKGVRYGKDNAESATLMEMKAWHAIRKALESNGLKTEWNGLKTKPELLDKIGTAFSIYKTDEDISQYLNGELSPAVLNALLENLSFDKFIRLSLQSLAKILPLMEQGLRYDEACKQVYGDHYGKKEQLELRFLPKIPVEDIRNPVVLRTLSQARKVINGVVRLYGSPARIHIETGREVGKSFSERRDISKRQEENRNERQRAVEKFKEFFPHFVGEPKAKDILKMRLYEQQHGKCLYSGKELDLNRLLEKGYVEIDHALPFSRTWDDSFNNKVLVLASENQNKGNQTPYEWLNGKENAERWKLFQALVNGSRFPYSKKQRILTKYLDEDGFRERNLNDTRYVARFLCNFIEDNMQLVGQGKKRVFASNGQITALLRRSWGIQKVREDNDRHHAVDAVVVACSTRALQKKITDYVRYKEMNVFTGEKIDQETGEIIKFHFPEPWKFFRQEVEIRVFSETPAEDVVIALPDRPQANHEFIQPLFVSRAPTRKMTGQGHMETIKSAKRLAEGLSVSRVPLTQLKLKDLENMVNREREKALYEALKVRLEKFNNDPAKAFADPFYKKGGQQVKAVRVEQVQKSGVLVRQENGVADNASMVRVDVFIKGGKYFLVPIYTWQVAKGILPNRAATQGKEEEYWDIMDETAIFQFSLYQNDLIKLVTKKKTIFGYFNGLNRATSNINIKEHDLDKSKGKDGIYLEVGVKLALSLEKYQVDELGKNIQPCRSMKKRPPVR

SEQ ID NO: 102 - protein, 1081 aa, Neisseria flavescens
MTAFKPNPINYILGLDIGIASVGWAMVEIDEEENPIRLIDLGVRVFERAEVPKTGDSLAAARRLARSVRRLTRRRAHRLLRARRLLKREGVLQAADFDENGLIKSLPNTPWQLRAAALDRKLTPLEWSAVLLHLIKHRGYLSQRKNEGETADKELGALLKGVADNAHALQTGDFRTPAELAVNKFEKESGHIRNQRGDYSHTFSRKDLQAELVLLFEKQKEFGNPHISDGLKEGIETLLMAQRPALSGDAVQKMLGYCTFEPTEPKAAKNTYTAERFIWLTKLNNLRILEQGSERPLTDTERATLIDMPYKNKLTYAKARELLGLDDTAFFKGLRYGKDNAESATLMEMKAYHAIRRALEKEGLKDKKSPLSLSPELQDEIGTAFSLFKTDEDITGRLKGCLQPEILDALLKHINFDKFVQISLKALRRIVPLMEQGKRYDEACAETYGDHYGEKNSEEMLYLPPIPADEIRNPVVLRALSQARKVINGVVRRYGSPARIHIETAREVGKSFKDRKEIEKRQEENRKDREKAAAKFREYFPNFVGEPKSKDILKLRLYEQQHGKCLYSGKAIDIRRLNGKGYVEIDHALPFSRTWDDSFNNKVLVLGSENQNKGNRTPYEYLNGKDNSREWLEFKARVETSRFPHSKKQRVLLQKFDEKGFKERNLNDTRYVNRFLCQFVADHMQLTGKGKRRVFASNGQITNLLRGFWGLHKVRAENDRHHALDAVVVACSTVAMQQKITCFVRYKEMNAFDGKTVDKETGEVLHQKTHFPQPWEFFAQEVMIRVFGKPDGKPEFEEADTPEKLRALLAEKLSSRPEAVHEYVTPLFVSRAPNRKMSGAHKDTLRSAKRFVKHNEKISVKRVWLTEIKLADLENMVNYKNGREIELYEALKARLGAYGGNAKQAFDPKDNPFYKKGGQLVKAVRVEKTQESGVLLNKKNAYTIADNGDMVRVDVFCKVDKKGKNQYFIVPIYAWQVAENILPDIDCKGYRIDDSYTFCFSLHKYDLIAFQKDEKSKVEFAYYINCDSSNGRFYLAWHDKGSKEQQFRISTQNLVLMQKYQIDELGKEIRPCRLKKRPPVR

SEQ ID NO: 103 - protein, 1392 aa, Gemella haemolysans
MANKTWYLGLDIGSASVGWAATDTGYKIIRKNKKRLWGVRLFEEAKTAEDRRGYRSSRRRLARRKWRLNLLEELFTSEVKKVDENFFLRLKESQYHYEDKTHKVPYAIFNDKDYTDKDYYKDYPTIYHLRSKLMTEENPDIRKVFLAIHHIIKNRGHFLLQGQSFKDGNLNNLIKELLELDILHVGFEVTEEVVDKIADISLEKKTSKDKLNDIKELYPKEKQLLEVFRLIFGGKTSLDKLFAIDEYKELDAAIKSVSFKEKIYEEVRHDYEQVLSNYIELLDLAKLVYDSIILSDIKKEGKTLSESKVELFEKHRDDLLKLKNLVKNDSKLSEDKKVELYALIFKEDKDKGTNYVNYIRKSEEGKGCNYEDFKKFLVKELAKLEESSVKTEIIKDLELEQFLPLQRTKDNSVVPYQIHKEELVKILDNAARYHSFLNEKDESGYNVREKVIQLLEFRIPYYVGPLNSSKKAKEGGFAWSVRNTGYENTPVTPWNYSKVIDESASAEKFITNLTNKCTYLKGEDVLPKSSLLYSEFALLNELNALKYDGNRISLEARNTIIEKLFKQQGKKVTKTSIKNLLKAEGYIDGKGEITGIDITVKNDLKSYRDFKKILGNKFNSEHVENIILWITLYGESRKLIKAKIESVYGEVYSKDEITKMSRLVYKDWGRFSRKLLTELVSKKLYNEETGECLNIIGAMRQNNILFMELLADRFDYSKQIVEFNKELQEDVTEIAPEILDDLYVSPAVKRSIWQTVRIVEELKKIIGCAPAKIFVETTRSNQEKKKPTDSRKKQLELAYKAVKKDVKELEKEIGTINFDVLNDRLSSVEPSKLKAKKLYLYYTQLGRCMYSEEPINISELFDNNKYDIDHIYPQSKIKDDSFTNTVLVKRESNAAKTDRYPLGSDIQTPSNRRFWKFLKEKGLISDEKYNRLVRTEEFSDEELSGFIARQLVETSQSVKAVASILGELNPETSICYSKAENVSSFRQNFGKIKKGDRDSKNNDQLIKVREINDYHHAKDAYLNVVVGNVYDTKFTRNVFNFIKDKKDGRKYSLNKVFYENVSDSKTVAWEMDKTIHQVEKVMNNNNIMVTRRTSEQKGGLFDATVYKAKVAAKAKDGVYYPLKTSNSVVKDVAKYGGYTSIGIAYYSIFEYTIVNKKGEEKITRIIPIPIYISQNIKDSTALIEFGKSQIFCRAYEKIKDFKLLYRKLCIGSKININNYQYYIGGKSDERFYYDSAIQVTLDKKSEKYLKILSKYQNWKKENKDGELWENITKENNIELYNKLVEKMNSEIFTKKKSNKYNELNSEEIRNNFIKISVEEQAKVLLEILNLLTNKKSIFDLKSIDIKAARGKISFNLTSLIQFSIIEQSITGFYEKEITIIGDKGNDMENNNS

SEQ ID NO: 104 - protein, 702 aa, Helicobacter pullorum
MRKILKIDERIQFKEVDYTAKNPENKKFVEFKNLKKFCEILGAIVGDRALADSIARDMTLIKDEEELAQKLRGYGKFSQEQITQLSALHFSHHISLSLKALSEILPFMREGMRYDEACQEAKLQAKHNDKKSKFLPPFCESIYADELTNPVVHRAIAEYRKILNALIAKYGSVHKIHIELTRDVGKNFQEREKYKKEIESNYKARVQAMQECEKLGLTLSEGNILKLRLFREQNEICVYSGRKITLANLKEQGALEIDHILPYSRSSDDSYMNKVLVFTNENQNKGNKTPYEAFGGDSQKWGEIESLALRSGYPKKKAKRILDKGFGDREAGFKSRNIVDSGYIARLIANYTKEYLKFLPLDSHENTALIAGEKDSKIHVEAVKGMLTATMRHFWGLGSKNRYEHTHHAVDAIIIAYINAAMIQRFSQFRQNQESLKARFYAKELAKEEFKTQRAFFEPFSGFREQVLAKVGQIFVSRPPRKRARGALHEETFYSIDDKKLSETYGGKKGVQRALSLGKIRQIGTKIVANGPMVRVDIFKHTQSGRFYAVPIYTMDFALGILPNKAVVSGKDKDRIIKDWLEMDSCYEFCFSLFKDDVIEVQKRDMEKPELAYFVSLDASDGRIKVRHHCNDITKINENQKKLFSEAIEKEVVGRGSIQNLKVFKKYKVSPLGEIKEAKYEPRQPIALKTSPKKHRKQNNAQ

SEQ ID NO: 105 - protein, 1371 aa, Streptococcus dysgalactiae
MDKKYSIGLDIGTNSVGWAVITDDYKVPSKKFKVLGNTDRHSIKKNLIGALLFDSGETAEATRLKRTARRRYTRRKNRIRYLQEIFSSEMSKVDDSFFHRLEESFLVEEDKKHERHPIFGNIVDEVAYHEKYPTIYHLRKKLADSTDKADLRLIYLALAHMIKFRGHFLIEGDLNPDNSDMDKLFIQLVQTYNQLFEENPINASRVDAKAILSARLSKSRRLENLIAQLPGEKRNGLFGNLIALSLGLTPNFKSNFDLAEDAKLQLSKDTYDDDLDNLLAQIGDQYADLFLAAKNLSDAILLSDILRVNSEITKAPLSASMIKRYDEHHQDLTLLKALVRQQLPEKYKEIFFDQSKNGYAGYIDGGASQEEFYKFIKPILEKMDGTEELLAKLNREDLLRKQRTFDNGSIPHQIHLGELHAILRRQEDFYPFLKDNREKIEKILTFRIPYYVGPLARGNSRFAWMTRKSEETITPWNFEEVVDKGASAQSFIERMTNFDKNLPNEKVLPKHSLLYEYFTVYNELTKVKYVTEGMRKPEFLSGKQKEAIVDLLFKTNRKVTVKQLKEDYFKKIECFDSVEISGVEDRFNASLGTYHDLLKIIKDKDFLDNEENEDILEDIVLTLTLFEDKEMIEERLKKYANLFDDKVMKQLKRRHYTGWGRLSRKLINGIRDKQSGKTILDFLKSDGFANRNFMQLINDDSLTFKEAIQKAQVSGQGHSLHEQIANLAGSPAIKKGILQSVKVVDELVKVMGHKPENIVIEMARENQTTQKGQKNSRERMKRIEEGIKELGSQILKEHPVENTQLQNEKLYLYYLQNGRDMYVDQELDINRLSDYDVDHIVPQSFIKDDSIDNKILTRSDKNRGKSDNVPSEEVVKKMKNYWRQLLNAKLITQRKFDNLTKAERGGLSELDKAGFIKRQLVETRQITKHVAQILDSRMNTKYDENDKLIREVKVITLKSKLVSDFRKDFQFYKVREINNYHHAHDAYLNAVVGTALIKKYTKLESEFVYGDYKVYDVRKMIAKSEQEIGKATAKRFFYSNIMNFFKTEITLANGEIRKRPLIETNEETGEIVWDKGRDFATVRKVLSMPQVNIVKKTEVQTGALTNESIYARGSFDKLISRKHRFESSKYGGFGSPTVTYSVLVVAKSKVQDGKVKKIKTGKELIGMTLLDKLVFEKNPLKFIEDKGYGNVQIDKCIKLPKYSLFEFENGTRRMLASVMANNNSRGDLQKANEMFLPAKLVTLLYHAHKIESSKELEHEAYILDHYNDLYQLLSYIERFASLYVDVEKNISKVKELFSNIESYSISEICSSVINLLTLTASGAPADFKFLGTTIPRKRYGSPQSILSSTLIHQSITGLYETRIDLSQLGGD

SEQ ID NO: 106 - protein, 1007 aa, Helicobacter canadensis
MKVLGFDIGINSIGWAFVENNELKDCGVRLFTKAENPKTKESLALPRRNARSSRVRLRRRRSRLLSLKHIISKEFGLHYEDYIALDGNLPKAYTGKIESIYKLRYEALSQAISKEDLARVILHIAKHRGYMNKNQKTSQDSEKGAILSAIKENSNKIKHYQTAGEYFYKELFENLRDGTKEFKNIRNKAMKNEKTGNMESTYYNTILASDLEKELKLILEKQQAYHNYSDTFIKEVLEIAFYQRPLKDFSHLVGSCTFYENEKRACKNSYSAWEFIALGKIINTLESIKKDTGEIFSNEIITQILKEVLDKGSLSYTKLRKMINLDEKVKFKGLKYDKEGVEKTNLIEFKKLKEFKKALGEHNLERKTLDEIATHITLTKDENQLKKQLEQYALSQNQIDALAELDFNDHINLSFKALYEILPLMEKGKRYDEACNELGLKAKTSNQKSEFLPAFCDSIFAQELTNPIVNRAISEYRKVLNRLLKKYGKMHKIHIELARDAGLSKEARNKIEKEQKENKDINDKAEKTCKEFGLKPNAKNILKIKLWREQGEICAYSGKKITIDDLKEDKALEVDHIYPYSRSYDDSYNNKVLVFIKENQLKLNQTPYEAFGSNQEKWSKIQVLAQKLPYKKKNRILDENFKNKDQIEFISRNLNDTRYATSLIAKYTKEYLEFLPLSDDEDISLKSGEKGSKTHVQTMNGMLTSVLRHAWGFSQKDRNNHLHHALDAIIIAYSTNSIIKAFSDFKKNQEILKAKLYAKKLTSEEYKNQSKFTGFEKYRSKILEKLDSIFVSKPPNKNTKGALHEQTFYSYQDILEEYKTQEGLKRALECGKVRKIGTKYVVNDRMVRLDIFKKDNKFYGIPIYTMDFALGVLPNKVVTIGTDKDKIKKEWKTIDETYEFCFSLYKGDLVLIQKKEMQESEFAYYNGFDISSASISLEKHDNKFENLTENQKLLFPKAKEGDVEVRGIGIQGLKVFKKYMVTPLGEIQETRTEARQNIQPRKKHGLR

SEQ ID NO: 107 - protein, 1397 aa, gamma proteobacterium
MTKNYISPIAIDLGAKFTGVALYQYLEGADCTQEVAKGLLVDDRGNVTWSQEGRRGKRHQVRGYKRRKMAKRLLWLILDSEYGIKREEVTEPLLKFINGLLNRRGYTYISEEVDEESMNVSPLPFSEMMPDYFNSSAPLLEQLAKLLSDKNKLVRFRAEGKIPSNKNEFKKLLDTALDGKYKDEKKELSEAWGNILIASENVLKSTVDGHKSRSEYLANIKEDIKSNEELEKQISSKEIDGFYNLVGHLSNFQLRLLRKYFNDPNMSGVSYWDEKRLEKYFYQWVQGWHTKGGTDEAEKKNIILKTKGAPLLKTLKSLSADLTIPPYEDQNNRRPPKCQSVLLSDEKLTMHYPKWKEWVGQLVKQNDNAYLNENVTLANALHRIVERSRSIDPYQLRLLISITDAEKRNDLAGYKRLKLSLGSEVDEFLLLVKNIVDETKEAREGLWFETENKLFFKCGKTPPRKEKLKSTLLSAVLGKNLSDDEQSSFIEEFWKSGTPKIERRNVRGWCRLASQVQKTYGVYLKEYGLQQLHKLEAGKKLDDKPLALLYKNSGLIASKIGEALNIEPDEVSRFASPHSLAQIFNIIEGDVAGFNKTCRACTYENIWRMQEEKVESLLTNQLLSEIHGERKVPLKSAMCTRLSADSTRPFDGQMASIIEHIARKIAQHKIAQINDVPKEFSIDIPIIIESNQFSFTAELEEIKRGRGSAKAKKAKELGEKSKAGWVSKTERIKTSSEGICPYTGAPLGGSGEIDHIIPRSLTGRTKKTVFNSEANLIYCSSKGNHDKGNRVYVIEQLNDKYLKKQFSTSDVNLIKKKIKTTIQRFTEGGEKLRSFSELSREDQKAFRHALFVPELKSEVTSLLAVKNITRVNGTQAWLAKKIASLLAEHLDKQGRDYTLSAHQIDPWSVSKQRKMLASAEPIWAKKDPQPAASHVVDAVCTFLEALEQPHTASRLKTISSTSFEKTGWRSALIPDLIKVDALDRRPKYRRYNIGSTSLFKDGIYAERFLPILIDENGLMAGYDIDNSLKAKGADVVFESLSPFLLFKGEEVGAQSLSDWQERIDGRYLYMSIDKVKAFDYLQEKVGEKDIAAELLNSIHFTQRKTELRAKFSDDSGKKMKTLDAIRKSLKLTVTVNEIGKRKEKCGFSGTIGIPAKSAWENLLDEPLLETYWGTKMPPQEIWEKVYRKHFPRNIPNQAHRKVRKDFSLPVVDSVSGGFRVKRKTPNGYNYQLLAIDGYSAVGFKKEGDNVDFKSPALVPQIAESKSVTPISSELVHLDKNEIVYFDEWRKIDISDSDLKQFVSSLELAPGSQNRFYIRFTVDEDQFERHFKSALRVNGIQDLDTVNKTFDWNREIPSLLIPPRSNLFLLETGQKITFEYIANGANAEVKKAYSLRRA

SEQ ID NO: 108 - protein, 1082 aa, Neisseria meningitidis
MAAFKPNPINYILGLDIGIASVGWAMVEIDEEENPIRLIDLGVRVFERAEVPKTGDSLAMVRRLARSVRRLTRRRAHRLLRARRLLKREGVLQAADFDENGLIKSLPNTPWQLRAAALDRKLTPLEWSAVLLHLIKHRGYLSQRKNEGETADKELGALLKGVADNAHALQTGDFRTPAELALNKFEKESGHIRNQRGDYSHTFSRKDLQAELILLFEKQKEFGNPHISGGLKEGIETLLMTQRPALSGDAVQKMLGHCTFEPAEPKAAKNTYTAERFIWLTKLNNLRILEQGSERPLTDTERATLMDEPYRKSKLTYAQARKLLGLEDTAFFKGLRYGKDNAEASTLMEMKAYHAISRALEKEGLKDKKSPLNLSPELQDEIGTAFSLFKTDEDITGRLKDRIQPEILEALLKHISFDKFVQISLKALRRIVPLMEQGKRYDEACAEIYGDHYGKKNTEEKIYLPPIPADEIRNPVVLRALSQARKVINGVVRRYGSPARIHIETAREVGKSFKDRKEIEKRQEENRKDREKAAAKFREYFPNFVGEPKSKDILKLRLYEQQHGKCLYSGKEINLGRLNEKGYVEIDHALPFSRTWDDSFNNKVLVLGSENQNKGNQTPYEYFNGKDNSREWQEFKARVETSRFPRSKKQRILLQKFDEDGFKERNLNDTRYVNRFLCQFVADRMRLTGKGKKRVFASNGQITNLLRGFWGLRKVRAENDRHHALDAVVVACSTVAMQQKITRFVRYKEMNAFDGKTIDKETGEVLHQKTHFPQPWEFFAQEVMIRVFGKPDGKPEFEEADTPEKLRTLLAEKLSSRPEAVHEYVTPLFVSRAPNRKMSGQGHMETVKSAKRLDEGVSVLRVPLTQLKLKDLEKMVNREREPKLYEALKARLEAHKDDPAKAFAEPFYKYDKAGNRTQQVKAVRVEQVQKTGVWVRNHNGIADNATMVRVDVFEKGDKYYLVPIYSWQVAKGILPDRAVVQGKDEEDWQLIDDSFNFKFSLHPNDLVEVITKKARMFGYFASCHRGTGNINIRIHDLDHKIGKNGILEGIGVKTALSFQKYQIDELGKEIRPCRLKKRPPVR

SEQ ID NO: 109 - protein, 1334 aa, Listeria monocytogenes
MKKPYTIGLDIGTNSVGWAVLTDQYDLVKRKMKISGDSEKKQIKKNFWGVRLFEKGETAAKRRMSRTARRRIERRRNRISYLQEIFAIQMNEVDDNFFNRLKESFYAESDKKYNRHPFFGTVEEEVAYYKDFPTIYHLRKELIDSQKKADLRLVYLALAHIIKYRGHFLIEGALDTKNTSIDEMFKQFLQIYNQVFANDIEEASLKKTEKNQEVAQILAEKFTRKDKLDKILSLYPGEKTTGVFAQFVNIIVGSTGKFKKHFNLHEKKDINCAEDTYDTDLESLLAIIGDEFAEVFVAAKNAYNAVVLSNIITVTDSTTRAKLSASLIERFENHKEDLKKMKRFVRTYLPEKYDEIFDDTEKHGYAGYISGKTKQADFYKYMKATLEKIEGADYFIAKIEEENFLRKQRTFDNGVIPHQLHLEELEAILHQQAKYYPFLREDYEKIKSLVTFRIPYFVGPLAKGQSEFAWLTRKADGEIRPWNIEEKVDFGKSAVDFIEKMTNKDTYLPKENVLPKHSLCYQKYMVYNELTKVRYIDDQGKTNYFSGQEKQQIFNDLFKQKRKVKKKDLELFLRNINQIESPTIEGLEDSFNASYATYHDLLKVGMKQEILDNPLNTEMLEDIVKILTVFEDKRMIKEQLQQFSDVLDGTVLKKLERRHYTGWGRLSAKLLVGIRDKQSHLTILDYLMNDDGLNRNLMQLINDSNLSFKSIIEKEQVSTTDKDLQSIVAELAGSPAIKKGILQSLKIVDELVSVMGYPPQTIVVEMARENQTTNKGKNNSKPRYKSLEKAIKEFGSQILKEHPTDNQELKNNRLYLYYLQNGKDMYTGQELDIHNLSNYDIDHIVPQSFITDNSVDNLVLTSSAGNREKGDNVPPLEIVQKRKIFWEKLYQGNLMSKRKFDYLTKAERGGLTEADKARFIHRQLVETRQITKNVANILHQRFNYKTDGNKDTMETVRIVTLKSALVSQFRKQFQFYKVREVNDYHHAHDAYLNGVVANTLLKVYPQLEPEFVYGEYHQFGWFKANKATAKKQFYTNIMLFFAQKDRIIDENGEILWDKRYLETVKKVLGYRQMNIVKKTEIQKGEFSNVTPNPKGKSNKLIPRKKDWDPIKYGGFDGSKMAYAIIIEYEKQKRKVRIEKKLIQINIMEREAFEKDEKTFLEEKGYHQPKVLIKVPKYTLYECKNGRRRMLGSANEAHKGNQMLLPNHLMALLYHAEKYEAIDGESLAYIEVHRALFDELLAYISEFARKYTLSNDRLDEINMLYERNKDGDVKSIAESFVSLKKFNAFGVHQDFSFFGTKIERKRDRKLNELLNSTIIYQSITGLYESRKRLDN

SEQ ID NO: 110 - protein, 1337 aa, Enterococcus faecalis
MKKDYVIGLDIGTNSVGWAVMTEDYQLVKKKMPIYGNTEKKKIKKNFWGVRLFEEGHTAEDRRLKRTARRRISRRRNRLRYLQAFFEEAMTALDENFFARLQESFLVPEDKKWHRHPIFAKLEDEVAYHETYPTIYHLRKKLADSSEQADLRLIYLALAHIVKYRGHFLIEGKLSTENISVKEQFQQFMIIYNQTFVNGESRLVSAPLPESVLIEEELTEKASRTKKSEKVLQQFPQEKANGLFGQFLKLMVGNKADFKKVFGLEEEAKITYASESYEEDLEGILAKVGDEYSDVFLAAKNVYDAVELSTILADSDKKSHAKLSSSMIVRFTEHQEDLKKFKRFIRENCPDEYDNLFKNEQKDGYAGYIAHAGKVSQLKFYQYVKKIIQDIAGAEYFLEKIAQENFLRKQRTFDNGVIPHQIHLAELQAIIHRQAAYYPFLKENQEKIEQLVTFRIPYYIGPLSKGDASTFAWLKRQSEEPIRPWNLQETVDLDQSATAFIERMTNFDTYLSSEKVLPKHSLLYEKFMVFNELTKISYTDDRGIKANFSGKEKEKIFDYLFKTRRKVKKKDIIQFYRNEYNTEIVTLSGLEEDQFNASFSTYQDLLKCGLTRAELDHPDNAEKLEDIIKILTIFEDRQRIRTQLSTFKGQFSAEVLKKLERKHYTGWGRLSKKLINGIYDKESGKTILGYLIKDDGVSKHYNRNFMQLINDSQLSFKNAIQKAQSSEHEETLSETVNELAGSPAIKKGIYQSLKIVDELVAIMGYAPKRIVVEMARENQTTSTGKRRSIQRLKIVEKAMAEIGSNLLKEQPTTNEQLRDTRLFLYYMQNGKDMYTGDELSLHRLSHYDIDHIIPQSFMKDDSLDNLVLVGSTENRGKSDDVPSKEVVKDMKAYWEKLYAAGLISQRKFQRLTKGEQGGLTLEDKAHFIQRQLVETRQITKNVAGILDQRYNANSKEKKVQIITLKASLTSQFRSIFGLYKVREVNDYHHGQDAYLNCVVATTLLKVYPNLAPEFVYGEYPKFQAFKENKATAKAIIYTNLLRFFTEDEPRFTKDGEILWSNSYLKTIKKELNYHQMNIVKKVEVQKGGFSKESIKPKGPSNKLIPVKNGLDPQKYGGFDSPVVAYTVLFTHEKGKKPLIKQEILGITIMEKTRFEQNPILFLEEKGFLRPRVLMKLPKYTLYEFPEGRRRLLASAKEAQKGNQMVLPEHLLTLLYHAKQCLLPNQSESLAYVEQHQPEFQEILERVVDFAEVHTLAKSKVQQIVKLFEANQTADVKEIAASFIQLMQFNAMGAPSTFKFFQKDIERARYTSIKEIFDATIIYQSTTGLYETRRKVVD

SEQ ID NO: 111 - protein, 1426 aa, Capnocytophaga ochracea
MKNILGLDLGTTSIGFAHIVEDENKEKSEIKELGVRIVSLTTDEQSDFEKGKSITTNANRTLKHGARLNLDRYQQRRKYLIDLLQKANLITPSSILAENGKNTTHSTWQLRAKAVTERIEKEEFARILLAINKKRGYKSSRKAKTEDEGQAIDGMAIAKRLYDENLTPGQLSLQLLQQNKKLLPDFYRSDLQKEFDLVWNFQKQFYPDILTDIFYKELQGKGKDATSKAFSKRYHFDTTENKGSKESVRLQAYQWRAEAISKQLSKEEVAYVLTEINNNLNNASGYLGAISDRSKELYFNRQTVGQYLYAKLQENRHNSLKNKVFYRQDYLDEFERIWETQASFHKELTDELKKQIRDVVIFYQRKPKSQKGLISFCEFESKEIEIEKDGKTITKNIGARVVPKSSPLFQEFKIWQILNNVICKRKGIRKKKISAKTTQLDLLNESSQTIFSLDMECKQLLFDELNLKGDLKSDKVLKLLGYSPQEWEINYNQLEGNRTQKALYEAYLKIVEMEAHDVKDILQIKSAKDDWSLDESPLSASEIREKVKAIFQTLGICTKILYFDPLLPVKEFEEQDSYQLWHLLYSYESDDSTSGNETLYRILEKKYAFKREHARILANVALQDDYGSLSTKAIRKIYPNIKENQYSTACEKAGYKHSKLSLTTEELEARELKNIIPLLKKNALRNPVVEKILNQMINVVNALIEKNSERDAEGKITKYFHFDEIRIELARELKKNAQKRYEMTQNINKAKLEHQKISEILQKEFGIKNPTKSDIIRYRLYQELEHNGYKELYTNAPIARDMLFSKNIEIEHIVPKARVFDDSFSNKTLTFHRINSDKGEYTAFDYITSLNSEEELNQYLTRVENAYKTKSISPTKYKNLLKKASEIGDDFINRDLRDTQYIAKKAKEILFQVTKNVLSTSGSITDRLREDWGLVDVMKELNMPKYQSLGLTEVEERKDGNKVTVIKNWTKRNDHRHHAMDALTVAFTKPSYIQYLNHLNARKDENNKNYSVILAIEEKETIKVPTNNGKNKRVFIEPIPNFRQVAKKHLEEIFISHKAKNKVVTKNTNKPAGTDKQQITLTPRGQLHKETIYGKYQYYINKEEKIGVKFDERTIAKVSNPVYREALLKRLQANDNDPKKAFAGKNALSKNPIYLDESKTKTLPEKVNLTYLEEDFSIRKDISPDNFKDLKSIEKVIDQGVKRILIKRLQAYDNDPKKAFVDLEKNPIWLNKEKGIAIKRVTISGVNNAQPLHIGKDHLGKTTLNKEGKEIPVDYVSTGNNHHVAIYRDKEGNLQEQIVSFFDAVVRAQQGIPIIDKTYKQAEGWQFLFTMKQNEMFVFPNATTGFNPAEIDLLDPKNKKLISPNLFRVQKIATKDYFFRHHLETNVETDNILKNVTWKREGLSGLKDIVKVRINHLGDIVSIGEY

SEQ ID NO: 112 - protein, 1424 aa, Unknown
  Parabacteroides sp.D13
MKRILGLDLGTNSIGWALVNEAETDEEVSSIIRLGVRVNPLTVDETQNFEKGKSITTNAERTLKRSMRRNLQRYKLRRDALVEFLKELGFITDETILSEQGNRTTFETCRLRAKAAEEEISLEELSRVLLMINKKRGYKSSRKVKKEEDGVLIDGMEIAKKLYEEDLTPGQLCSQLLESGKKVLPDFYRSDLQEELDRIWSVQKQFHPDVFCDAAKEEIKGKNRSQTWAILANYFVWKEEVVGWNDREAKNETIEKECKLVGLKRTTKGYELKKENYRWRAQALTEQLGLEEIAVVLQEINGQINASSGYLGAISDRSKVLYFNHQTVGQYQMAELDKNPHASLRNMVFYRQDYLDEFDRIWEKQAEFHKELTAELKKEIRDMIIFYQRRLKSQKGLISFCEFERLEIVVEKDGKKQTKVIGCKVIPRSHPLFQEFKVWQTLNDIKVLGREKKRNALSASESRALYPEEKEILARELAIKENMKKADVLKLLFENPQELDLNFKQIDGNRTGFSLFSAYSKMIEKYGYEPLDFKKPADEIIGQLRTIFTDLGWNTNLFTIDLTKEGKELEMQPYFRLWHLLYSFEGDNTSTGNGKLIEKIMQLCGVEKEYAVELASLSFQDDYGSLSAKAIKRILPYLKEGNLYDVACEYAGYRHSKSSLTKEEIENKVLKGKLEVLPKNSLRNPVVEKILSQMVNVINTIIDTYGKPDEIRVELARELKKSAKEREELTKAIAKSTREHEEIRKLLQDEFGMMNVSRNDIIRYKLYEELKDNGYKTLYSNQYIPKEKIFSKEIDIEHIIPQSRLFDDSLSNKTLEYKAINIEKGNKTAYDFVKEKYGEEGLQQYINRCESLFNDKKAKLRKLKMEQKDIPDGFIDRDLRNTQYIAKKALAMLNEICRRVVATTGSITDQLREDWQLVDVMKELNLPKYEALGFVETYEDKDGRKIKRIKDWTKRNDHRHHAMDALTVAFTKDAFIQYFNNKNAAQDSGNRNHTNIIGIKTRYFDKGRALPPIPLEQFRIEAKQHLEKLLVSIKAKNKVVTVNVNRTKKRKGENTKIQQTPRGQLHLETVYGSHKQYVTKIEKVNASFDAAKIATVSKRAYRNALLKRLETFGNDPKKAFTGKNALEKNPLYADKYQTIRVPEKVQTVEFETIYTIRKPVDPALNVDKVVDVKVRAILERRLKEYGGDPKKAFVNFWENPIWLNKEKGISIKRVSIRGINNAQSIHVKKDKNGNPIWDENGKQIPVDFVNTGNNHHVAIYRKPVLDKKGQVTFDEDGNLMYELDEVVVPFFEAVTRANLGLPIIDKDYRKSEGWQFLFSMKQNEYFVFPNEKTGFNPKEVDLLNPDNYAMISPNLFRVQTMSKVMYGNNVVRDYKFRHHLETTVKDMKELKDIAYKQYKTLSFGNSVVKIRINHIGQIVSVGEY

SEQ ID NO: 113 - protein, 1395 aa, Lactobacillus jensenii
MKEIKDYIIGLDIGTNSCGYVVTDKQNNILKLKGKTAIGARLFKEGQAAADRRSFRTTRRRLARRHWRLGLLEEIFDPEMEKIDPNFFRRLKESDYSPKDSRKQFNAIVFKSIKADKRFYKKYPTIYHLRNALMHDNQKHDLREIFMAVHHIVKYRGNFLREDSVNAFKAAKFSLRGEDGIGPVDKLNDLLKEIYSEYSPELATNNLSKIEDIIKDKNLYKQDKLKQVATLLIKEADSKDKAKLNKDIAKQVANSFMGYMFRLDTLFSLTDVDVKDYKLKFSDANIDESLDDLTSLLTDAQIEFVLELQSIYNTIVLNEIVPDGMSLSESMIKKYDDHKEDLKIFKEYIDSLSDQKKAKKLLSAYNLYVNYRKSDLVEAKNLFKNKKVGDKNFADVISNFEVFGKFVSDNLDDSELANKIKARLDLGEFLPKQRTNQNGVIPYQLHQVELTQILEKQGKYYPFLITPNPVESHRNNAPYEISELVSFRVPYYVGPLIDNQSIKDKQNKNKFAWMVRQKQGQITPWNLEEMVDTTESANQFIKRMTRKDTYLLAEDVLPKSSLVYQKFMILDELNRIKIDGKKLTSELKHDIFEKLFKKQKSINLDNLKNYLLVEGNIPGLIEGLSDGINFNNSFSTYIDYRNIFGDEIDNPNKQADFEKMIEWSTVFEDRKIFKRKLKEITWLTSEQIKQVSSKRYSGWGRLSKKLLTQITDENGVNILQRLWNEPETLTEVLANPVIKRKIVEANSSFTKAKDMKDILVEAYTSPQNKKAIRQVMRVVDDIIAAAHGKKPSQIAIEFAREDQDNPQMTKSRKAQLDQIYAKISDEFLDDAVKNELKNMKDNKPLAKDKVFLYFKQMGRDAYSGEKLSLDNLQDYDIDHIYPQSFIKDDSFDNRVLVQRAYNNGKSDNVPVLLFGNKIAAGLGITIRQMWKKWLELGLISKRKFNNLITDPEKISRNMASGFVNRQLVETSQVIKLVANILQAKLPDTEIIEVKASYNSILRKEFNLYKSREVNDYHHAIDAYLTTIVGNYLYQVYPKLRPYFVYGQFKKFGKAENQEDDPVKKIKKFNFIYQLIWGKDDAICISHTNQQVFSKKDIIDKLTTAYNFKYMNISHAVYTRNNNMFKQTLFPIIERTTAKTKSLIPKKLDRPTDIYGGYSNNNDAYLALVKVDKKRGSEYRVVGIPMRAAAMLKASKNYDEDLRKVIEPMVMFDKNGKAKRGIEGFRVLVGKMPFKQAVLDGNKKFMLTGTVDTPNLKQLVLSQQNMKYILDYIEDVDCRKHKFGDKVQNPDKCLLEVFDEIIEIVDKYFELFDSRDFREKLRNSRNKFIKLEASKKADTILAILKGLQAKSTRATIKELNISDFGRIITSSISPEAQLIYQSPTGLFERRVKVKDL

SEQ ID NO: 114 - protein, 1140 aa, Roseburia intestinalis
MRENGSDERRRNMDEKMDYRIGLDIGIASVGWAVLQNNSDDEPVRIVDLGVRIFDTAEIPKTGESLAGPRRAARTTRRRLRRRKHRLDRIKWLFENQGLINIDDFLKRYNMAGLPDVYQLRYEALDRKLTDEELAQVLLHIAKHRGFRSTRKAETAAKENGAVLKATDENQKRMQEKGYRTVGEMIYLDEAFRTGCSWSEKGYILTPRNKAENYQHTMLRAMLVEEVKEIFSSQRRLGNEKATEELEEKYLEIMTSQRSFDLGPGMQPDGKPSPYAMEGFSDRVGKCTFLGDQGELRGAKGTYTAEYFVALQKINHTKLVNQDGETRNFTEEERRALTLLLFTQKEVKYAAVRKKLGLPEDILFYNLNYKKAATKEEQQKENQNTEKAKFIGMPYYHDYKKCLEERVKYLTENEVRDLFDEIGMILTCYKNDDSRTERLAKLGLVPIEMEGLLAYTPTKFQHLSMKAMRNIIPFLEKGMTYDKACEEAGYDFKADSKGTKQKLLTGENVNQTINEITNPVVKRSVSQTVKVINAIIRTYGSPQAINIELAREMSKTFEERRKIKGDMEKRQKNNEDVKKQIQELGKLSPTGQDILKYRLWQEQQGICMYSGKTIPLEELFKPGYDIDHILPYSITFDDSFRNKVLVTSQENRQKGNRTPYEYMGNDEQRWNEFETRVKTTIRDYKKQQKLLKKHFSEEERSEFKERNLTDTKYITTVIYNMIRQNLEMAPLNRPEKKKQVRAVNGAITAYLRKRWGLPQKNRETDTHHAMDAVVIACCTDGMIQKISRYTKVRERCYSKGTEFVDAETGEIFRPEDYSRAEWDEIFGVHIPKPWETFRAELDVRMGDDPKGFLDTHSDVALELDYPEYIYENLRPIFVSRMPNHKVTGAAHADTIRSPRHFKDEGIVLTKTALTDLKLDKDGEIDGYYNPQSDLLLYEALKKQLLLYGNDAKKAFAQDFHKPKADGTEGPVVRKVKIQKKQTMGVFVDSGNGIAENGGMVRIDVFRVNGKYYFVPVYTADVVKKVLPNRASTAHKPYGEWKVMEDKDFLFSLYSRDLIHIKSKKDIPIKMVNGGMEGIKETYAYYIGADISAANIQGIAHDSRYKFRGLGIQSLDVLEKCQIDVLGHVSVVRSEKRMGFS

SEQ ID NO: 115 - protein, 992 aa, Treponema vincentii
MQKNSGEDENCGFEFLTEEEKELIKPLFFRISKPSFQFADIEKKLKGKNGFWKFNYRKDTNVSGCPVSAGLKNIFGDEASAESWKDKKVGQYDMCDIWHVLFDFDDEEKLLEFAKRKLFLSDEAAKKFCAIRIQQGYANLSLKAIRKITPFLRKGYIYSTAVFLANIPFMIGRDIFLQNEKEIEDSVKNIIGTLRDKNNIIVLANRCIESAFKDKDNDFRFEEWDKALVENSAWDLFGKKKWNEYDEEKRKTIISQVSEKVEDNLKIAVGKNPNDYKYPLLRTDDLIMDYLNQKGFVVKGELYHPSDTDYNFETPVPAEDGKIYLASPRSPSVKNPVVMRALHQLRKLVNYLIKTGKIDSTTKINVELANDVNDKNQRKAIEELAKTNEKNNADARKKIEELCNEAGFKVVPTESDIKKFRLWKEQNETCPYTGKHISFTDLFGPIPKFDFEHTIPRSLSYDDSLENLTLCDSEFNRNIKKQRLPSELPDFEEINKRFLKFYEDKIDNCLRIIELNSKSGGSYEEPAVKDLRIVKKHKAQYELNYYKEKLRRFSSTEITSGFKHSQLNDTRIITKFSLSYLKGVFDHVQPVKGSMTDTFKRQWGLMERNEIKDRSNHTHHTVDALTVACINRGKFNLLSEAIKNSSDGKHLKFPKPWETFDTDVLNAVRYIIPKYFSDESSLRQSKKILRGRDGKPVLKNGKAVFIQGATARGSLHKDTFYGCIKTVPEKGGKSEMIFVQRIPVSTLDEKVAEKIIDKRIRKTFEKNLSTGIQTLQEIQTDGILLPFKKEGRDVFVKRVRIKAHPTSPIILKKHHNVINKNPKDYKQNYYVENEENYLLAIYRGKDAKGKDVSDHKLCNLLNAVKSRQNKTGFYPDFKEKKGINLQLYKVLKIGKIVILQNDIQEDVFALPKEKLWKRMYRIAGLATSRNDIQIKLVHIIRETPWGYMKGEKDLNAGKECLLYGTANFKGLVEGQDFTVSPAGEIIQKARVC

SEQ ID NO: 116 - protein, 1340 aa, Enterococcus faecium
MKKEYTIGLDIGTNSVGWSVLTDDYRLVSKKMKVAGNTEKSSTKKNFWGVRLFDEGQTAEARRSKRTARRRLARRRQRILELQKIFAPEILKIDEHFFARLNESFLVPDEKKQSRHPVFATIKQEKSYHQTYPTIYHLRQALADSSEKADIRLVYLAMAHLLKYRGHFLIEGELNTENSSVTETFRQFLSTYNQQFSEAGDKQTEKLDEAVDCSFVFTEKMSKTKKAETLLKYFPHEKSNGYLSQFIKLMVGNQGNFKNVFGLEEEAKLQFSKETYEEDLEELLEKIGDDYIDLFVQAKNVYDAVLLSEILSDSTKNTRAKLSAGMIRRYDAHKEDLVLLKRFVKENLPKKYRAFFGDNSVNGYAGYIEGHATQEAFYKFVKKELTGIRGSEVFLTKIEQENFLRKQRTFDNGVIPHQIHLSELRAIIANQKKHYPFLKEEQEKLESLLTFKIPYYVGPLAKKQENSPFAWLIRKSEEKIKPWNLPEIVDMEGSAVRFIERMINTDMYMPHNKVLPKNSLLYQKFSIYNELTKVRYQDERGQMNYFSSIEKKEIFHELFEKNRKVTKKDLQEFLYLKYDIKHAELSGIEKAFNASYTTYHDFLTMSENKREMKQWLEDPELASMFEEIIKTLTVFEDREMIKTRLSHHEATLGKHIIKKLTKKHYTGWGRLSKELIQGIRDKQSNKTILDYLINDDDFPHHRNRNFMQLINDDSLSFKKEIKKAQMITDTENLEEIVKELTGSPAIKKGILQSLKIVDEIVGIMGYEPANIVVEMARENQTTGRGLKSSRPRLKALEESLKDFGSQLLKEYPTDNSSLQKDRLYLYYLQNGRDMYTGAPLDIHRLSDYDIDHIIPRSFTTDNSIDNKVLVSSKENRLKKDDVPSEKVVKKMRSFWYDLYSSKLISKRKLDNLTKIKLTEEDKAGFIKRQLVETRQITKHVAGILHHRFNKAEDTNDPIRKVRIITLKSALVSQFRNRFGIYKVREINEYHHAHDAYLNGVVALALLKKYPQLAPEFVYGEYLKFNAHKANKATVKKEFYSNIMKFFESDTPVCDENGEIFWDKSKSIAQVKKVINHHHMNIVKKTEIQKGGFSKETVEPKKDSSKLLPRKNNWDPAKYGGLGSPNVAYTVAFTYEKGKARKRTNALEGITIMEREAFEQSPVLFLKNKGYEQAEIEMKLPKYALFELENGRKRMVASNKEAQKANSFLLPEHLVTLLYHAKQYDEISHKESFDYVNEHHKEFSEVFARVLEFAGKYTLAEKNIEKLEKIYKENQTDDLAKLASSFVNLMQFNAMGAPADFKFFDVTIPRKRYTSLTEIWQSTIIHQSITGLYETRIRMGK

SEQ ID NO: 117 - protein, 1363 aa, Lactobacillus rhamnosus
MTKLNQPYGIGLDIGSNSIGFAVVDANSHLLRLKGETAIGARLFREGQSAADRRGSRTTRRRLSRTRWRLSFLRDFFAPHITKIDPDFFLRQKYSEISPKDKDRFKYEKRLFNDRTDAEFYEDYPSMYHLRLHLMTHTHKADPREIFLAIHHILKSRGHFLTPGAAKDFNTDKVDLEDIFPALTEAYAQVYPDLELTFDLAKADDFKAKLLDEQATPSDTQKALVNLLLSSDGEKEIVKKRKQVLTEFAKAITGLKTKFNLALGTEVDEADASNWQFSMGQLDDKWSNIETSMTDQGTEIFEQIQELYRARLLNGIVPAGMSLSQAKVADYGQHKEDLELFKTYLKKLNDHELAKTIRGLYDRYINGDDAKPFLREDFVKALTKEVTAHPNEVSEQLLNRMGQANFMLKQRTKANGAIPIQLQQRELDQIIANQSKYYDWLAAPNPVEAHRWKMPYQLDELLNFHIPYYVGPLITPKQQAESGENVFAWMVRKDPSGNITPYNFDEKVDREASANTFIQRMKTTDTYLIGEDVLPKQSLLYQKYEVLNELNNVRINNECLGTDQKQRLIREVFERHSSVTIKQVADNLVAHGDFARRPEIRGLADEKRFLSSLSTYHQLKEILHEAIDDPTKLLDIENIITWSTVFEDHTIFETKLAEIEWLDPKKINELSGIRYRGWGQFSRKLLDGLKLGNGHTVIQELMLSNHNLMQILADETLKETMTELNQDKLKTDDIEDVINDAYTSPSNKKALRQVLRVVEDIKHAANGQDPSWLFIETADGTGTAGKRTQSRQKQIQTVYANAAQELIDSAVRGELEDKIADKASFTDRLVLYFMQGGRDIYTGAPLNIDQLSHYDIDHILPQSLIKDDSLDNRVLVNATINREKNNVFASTLFAGKMKATWRKWHEAGLISGRKLRNLMLRPDEIDKFAKGFVARQLVETRQIIKLTEQIAAAQYPNTKIIAVKAGLSHQLREELDFPKNRDVNHYHHAFDAFLAARIGTYLLKRYPKLAPFFTYGEFAKVDVKKFREFNFIGALTHAKKNIIAKDTGEIVWDKERDIRELDRIYNFKRMLITHEVYFETADLFKQTIYAAKDSKERGGSKQLIPKKQGYPTQVYGGYTQESGSYNALVRVAEADTTAYQVIKISAQNASKIASANLKSREKGKQLLNEIVVKQLAKRRKNWKPSANSFKIVIPRFGMGTLFQNAKYGLFMVNSDTYYRNYQELWLSRENQKLLKKLFSIKYEKTQMNHDALQVYKAIIDQVEKFFKLYDINQFRAKLSDAIERFEKLPINTDGNKIGKTETLRQILIGLQANGTRSNVKNLGIKTDLGLLQVGSGIKLDKDTQIVYQSPSGLFKRRIPLADL

SEQ ID NO: 118 - protein, 1234 aa, Prevotella tannerae
MPNFWSIFTENLQTYLMKTRILGLDTGTNSLGWAVVDRDENNQYTPICRGDLIFTEGVKQEKGIEFSLAAERTSYRASRRHYFRRRLRKVEVLKVLVKHKLCPPLSDEALNRWHTKKEYPLDEDFILWQRTNEADNKNPYHDRHICLHRKLNLKDSQTDRYTLGRALYHLTQRRGFLSNRLDQNEEAEETGKVKSAISELSKEMKEAGCEFLGDYFYLLYRTEGNRVRIRSRYTDREKHYLQEFKEICRVQELDEDLAKALEKTIFFQRPLKSQRQGVGKCTMEKGHSRCAVSHPLYEEYRLLCYLNNIRIKTPSDDRLRPLNAEEREKITPLFYKEKNFDFEKIAKKLAGKTPFGWIRDAEDWPYQFNYRMTQEAPACPTTAQLIKVFGEDWKAALAETYTMSAKQDGTLKTEDEICTDIWNVLYSFSSKEKLKEFGLKKLQLDEVQAKAFSEIRLTRDFASLSLKAIRKILFFLRTGEDYSKAIFLANIPTIVGEEIWNDIERRSRLLYKVDLALRPQEERDAEEHRTIAERIKAAVAAEVPDAPIDLLYHPSMIEAYPDAKRNERFDCYQLGSPKTNAVRNPMAMRSLHMVRKVINHLLRKHIIDEKTEIHIEYARELNDANKRQAIADWQRELSKRHTAYAQNIRQLYKAETGLVIEPTKADILKYQLWEEQQHVCLYTGKKIGIADFLGANPKFDIEHTIPRSRGGDSTQENLTLCESKFNRDIKRDKLPTELANYEEILARIEHWKKQCYALKLKRDGIRTHSGLEKSIKDSRIRRRHLVGLEYGYLKGKYDRFTMKEVPEGFSRRQGAGIGLISKYAGLFLKSLFKDPKNPNRSNVYVVKGAITAEFRKLWGLQQADEAKSRENHTHHCIDAYTIACIGPCEYAALAAYYRSDEEFKYGRRREKPQFEKPWPTFTEDLLKLQEELLIVHQTTDKLGKRDRRKVKTPRGKFLTGGDSARGRLHQETYYGAINYDGNIKYVVRKPLDSLTEKDLDKIVDETVMGIVKGAVEAKGSLKEALADGIYMNKEKGILIKRVRIFSDVSEPINLKQLRDVSTKEYKRHIHLRKDENYLFAIYEGIDKKKNKKQTETATVDYLDAAKFYKDSKRRDKANSLVGDYSKKNKLPLKCILKKRQMVLFYEHSPEEIRFKDKKDLSRRLYIVTSIAKDGRVKFLHHQAATATGIQSSPSPFTNDGEHQPYYRLSASNIKVLVAGIDFDINILGEITPKL

SEQ ID NO: 119 - protein, 1496 aa, Prevotella veroralis
MKTILGLDLGTNSIGWAKVCVDDNGNYLRDIKLGSRIIPMSQDVLGNFDKGVTESQTSVRTGFRGVRRIRERSLLRRERLHRVLHVLGYLPPHYDSAIGWNKNEPSTYGKFLNHGEPKLAWEHKEDGSMRFLFMESFHEMMADFAKSQPSLVSDGKKIPLDWTIYYLRKKALSQPIRKEELAWLLLNFNQKRGYYQLRGEEDDDNPTKCEEYYELKVVGIEADEEGKNGNTWYNVKLENGWIYRRQSKIPLDDWIGKVREFIVTTEYEKDGITLKKDKNGDVKRSFRSPSEDDWGLRKKRTEKLLDSSKMTVGAFVYDHLLAEPSDKIRGKFIRTIERKYYKKELYAILCEQSKYHEELRSGDYLNKCAEELYKNNQPHRNSLLTKDLAYLLLEDLIFYQRPLKTKKSLIAECPYEAYKYVDKETGEIKRQGIKCIAKSNPYYQEFRLWQFISNLRLFNKADDKEVTADYLPTQDDYVRLFAYLNDRKEINQETLLKEFFKLKKITVNSEKVFPIRWNYIEDKEKKYPCNETRHELLLALDRARIDHSWLEKPGQEYRLWHLLYSVESKEETKEALRKLKDDDAFVESFLKVKPFKREYGAYSEKAIKKLLAVMRMGSLWRETDICDTTKGNITKILQGEIDEKLKEKISASVSSYNQLSDFQGLPVWLACYVVYGRHSEAAEIQHWKTPESLLAYINGFKQHSLRNPIVEQCILETLRTVHDIWKEVGHIDEIHVELGRNMKSTADQRARISENVLRNENTNLRIKSLLLELKNDPNIKDVRPYSPMQQEKLRIYEEGVLQELTKDDKDFTEITKISTMAQPSAKELQRYKLWLEQKYRSPYTGKSISLTKLFTSAYQIEHVIPQSRYFDDSFSNKVICESEVNSLKDNMLGYEFIKNHGGEIIHCTMLGDVKVLSESEYKAFVNDHYAHNKRKRENLLLEDIPQEFLNRQMNDSRYISKVVKALLSNIVRAEGEEEATSKFVVSCSGGITDRLKKDWGLNDVWNKIVYPRFERLNRLTGTEAFGQWENKDGKRVFQTAVPLELQRGFNKKRIDHRHHAMDALVIACTSRNIINYLNNESANNPKKREDLRQKLCDKNRTIRKPWETFTQDATAALEDVIVSFKNYVRIINKATNYYERYDVEGKKVIAEQRGDDMWAIRKPMHEATYYGRVNLRRKKKVNLRVALENISSICDNKLRIYINGLVEKGFNTKQILDKFKNTNDHFSMQKIDKVEIWQFTNEEEKLVATRKPLDTSFDTKKIASITDTGIQTILLNYLETKGGDSTIAFTPEGIVEMNQNISKYNNGKEHMPILKVRLYTKLGKKIPVGQTGCKAKQFVIAEAGTNLYFAIYEDEEGKRSYRTIPLNEVVERLKQGLSPVPEKNDKDVHLKFYLSPNDLVYVPIEDEHESLAKDHIYKFVDSSGTTANFIPHRSANVIFELNKKDAEKFCSGSIIQNEYGVGSSQSKNQKAITGEMIKAVCRKLEVDRLGNVIKVI

SEQ ID NO: 120 - protein, 1082 aa, Neisseria cinerea
MAAFKPNPMNYILGLDIGIASVGWAIVEIDEEENPIRLIDLGVRVFERAEVPKTGDSLAAARRLARSVRRLTRRRAHRLLRARRLLKREGVLQAADFDENGLIKSLPNTPWQLRAAALDRKLTPLEWSAVLLHLIKHRGYLSQRKNEGETADKELGALLKGVADNTHALQTGDFRTPAELALNKFEKESGHIRNQRGDYSHTFNRKDLQAELNLLFEKQKEFGNPHVSDGLKEGIETLLMTQRPALSGDAVQKMLGHCTFEPTEPKAAKNTYTAERFVWLTKLNNLRILEQGSERPLTDTERATLMDEPYRKSKLTYAQARKLLDLDDTAFFKGLRYGKDNAEASTLMEMKAYHAISRALEKEGLKDKKSPLNLSPELQDEIGTAFSLFKTDEDITGRLKDRVQPEILEALLKHISFDKFVQISLKALRRIVPLMEQGNRYDEACTEIYGDHYGKKNTEEKIYLPPIPADEIRNPVVLRALSQARKVINGVVRRYGSPARIHIETAREVGKSFKDRKEIEKRQEENRKDREKSAAKFREYFPNFVGEPKSKDILKLRLYEQQHGKCLYSGKEINLGRLNEKGYVEIDHALPFSRTWDDSFNNKVLALGSENQNKGNQTPYEYFNGKDNSREWQEFKARVETSRFPRSKKQRILLQKFDEDGFKERNLNDTRYINRFLCQFVADHMLLTGKGKRRVFASNGQITNLLRGFWGLRKVRAENDRHHALDAVVVACSTIAMQQKITRFVRYKEMNAFDGKTIDKETGEVLHQKAHFPQPWEFFAQEVMIRVFGKPDGKPEFEEADTPEKLRTLLAEKLSSRPEAVHKYVTPLFISRAPNRKMSGQGHMETVKSAKRLDEGISVLRVPLTQLKLKDLEKMVNREREPKLYEALKARLEAHKDDPAKAFAEPFYKYDKAGNRTQQVKAVRVEQVQKTGVWVHNHNGIADNATIVRVDVFEKGGKYYLVPIYSWQVAKGILPDRAVVQGKDEEDWTVMDDSFEFKFVLYANDLIKLTAKKNEFLGYFVSLNRATGAIDIRTHDTDSTKGKNGIFQSVGVKTALSFQKYQIDELGKEIRPCRLKKRPPVR

SEQ ID NO: 121 - protein, 1512 aa, Fibrobacter succinogenes
MKKILGLDLGTNSIGWAVVNADEITRDDGSRYLKPNGISAAGSRIIPMSADILGDFEKGNSISQTAERTRMRMARRLHERALLRRERLLRVLNLLDFLPKHFADKIDRYGKFTDDSEPKLAWRKNTEGKYEFIFQDAFNEMLAEFKDKQPEIVEEGKKIPYDWTIYYLRKKALEKALSKEELSWILLQFNQKRGYYQLRGEEEEIPQDKKIEYLAQKVVKVEATDQKKGDDVWYNVYLENGMIYRRTSKAPLDWEGKVKEFIVTTEVENDGETPKKDKEGNIKRSFRAPKEDDWTLLKKKTEADIENSHKTVGCYIYDSLLNNPKQKIIGKLVRTVERKFYKEELTQILKKQVELIPELRDDNLYKQCIEELYPINEAHRNTIAKTDFANLFINDILFYQRPLKSKKSQIDNCPYEERIFIDSKTGEKKKVPVKCIAKSNPLFQEFRLWQFIQNLRIYQREKEIDGKLLTDIDITSECLKSEEDYVRLFDWLNDRETIEQEDLLKHLFNTKKSKNKENPYRWNYVEDKVYPCNETRATILKGFSKCGINASVLSPELEMALWHILYSVEDKKEIETALTHFAQKQGWNDDFAKVFSKAKPFKKDYGSYSEKAIKKLLSLMRMGKYWNQDNIDKNTLDRIDKIINGEYDEKISNRVRDNAINLKDISDFRGLPVWLACYIVYDRHSEAKDCTKWNSPEEIDSYLKKFKQHSLRNPIVEQVVTETLRTVRDIWIQEEQIDEIHLELGRDLKNPADKRKKMSENILKNENTNLRIKAMLMEFMNPSMGIENVRPYSPSQQDILRIYEENALDNLTKDDKDFDFISKISKQAQPSKTDIIRYKCWLEQKYRSPYTGKTISLSKLFTPAYEIEHVIPQSLYFDDSFSNKVICEAEVNKLKDRQLGYKFIAEHHGEKVQLSQGEVVEILSVDAYEKFVKENYANNRIKMKKLLMESIPDEFIERQLNDSRYISKVVKGLLSNIVREKIDDENYEPEAVSKNLISCNGAITDRLKKDWGMNDVWNSIILPRFIRMNQITGKDCFTTTNAEGHLIPQMPLELQKGFNKKRIDHRHHAMDAIVIACTTRDHVNLLNNEAAHSKFNATRYQLQRKLRRFEKAVIDGKEREVAKEFLKPWDSFSSDSKNILENIIVSFKQNQRVINKTTNAFLHFDENGKKTFIKQGKGDSWAIRKSMHKDTVFGEINLRKVRSVSLNEAIKVPERVLNKKIKEKILELKNNKIDAKNIKKYIEENHTGGYGIDSSKIDVFYFTKETKERFFATRKTLDTSFNQAKIKDSIADSGIQKILLAHLKSKNGDAEQAFSPDGIDEMNKNIVELNNGKFHQPILKVRVYEKADKFAVGQKGNKKVKFVEAAKGTNLFFAIFEKDGKRSYLTIPLNVMIDCQKQYGNQWKNNIEAYLKEKELVEKDVKLQFILSPNDLVYLPTEGSIDKKRIYKVVSFTNNRLYAIPYAIAKSIVDKNEFTQLNKIEFTDNKESIKDACVPVIIDRLGNVIEFNGKRL

SEQ ID NO: 122 - protein, 1259 aa, Streptobacillus moniliformis
MKYILGLDLGVASIGWAVTEINEKGEPVGLIDANSVIFKPLDNDKGKLYNVERRDKRGSRRILRRKKHRVERTKMLLVNSSFLTNEEIDNLYVGKLDNIYEVRLKGLKEQLSKNEIARLMIYYCKNRGFKSNRKTEDLEILKSLGEKISEKDSDEKKLKPIIAKNTELIESKGLTPIEVIYMIRENDNSILGFKNKEGNYKFGFKRNQVIDEVRKILGTQQILSKEIVDEYIDILSSQRDFSDGPGGDSKYKIDYTKLAGKCKYTGEVRAVKSAPSYEIFTMLQKLNDIRYVKFTSEDKIEKKKLSKEVIHKLYDLVVEKNKTLTYDLIEKSIDEENIKLLNIPKLSKSKYVELRKSYFKERNDNENLTEEEINAFNEKLNNERMKQELIRNNLKAYKELKSKFKKNNIDENRIKELGGIYFLDLVAELLTYSKTDEKLEYFVENVERYSLFKEQRDIVEIIKTFPNYTKNGNLSLSLVRELNKLLMEGHDYESSLSSLNYYIDTDVDWEKFPTISEIEDSLSTKITNPNVKHILVILRKLYNTLLFKYGRPEKVHLELSRDFSNDFSTRNKIQKEQLENKVRREVAAFEMYGANKDIVAGKDRLSNDDFVRIKLWEEQNKVCMYSGRTIEKYQLTSAEVQIDHILPYSKSFDNSYSNKVLVFSNENQDKKERTPYQWLKGTEKWNEFKQRVRLNLNISNKKKENLLFEDEVVNNEFLERELHATSYSSRLALNIFQRLIPVSDEDKYDEHGNEKVKYLYNRNVIAFQGKMTSMLRNLYSLNKYTHSFESDTLDIDNKAFILKEFEINKDNLKMTAYNVNTGLEITSETKVEKNKSGEFKTIKDELLKKELDKKENLIEISDYFKDKVLFDLKIVDFEEIDTVEPEIISILYKMITALKEEVYSKNRENHLHHSLDAFLLTIMNRSMQMKLIKYNQLISVLKNKEIEIFNEEKGEYIDSKEFAEELQKQKIIDIDGNERGIKFNVNGKTHRLNLVKPYENFLDDIKNKIFDKRENNKLPYHVVKSKVSGALHAETILGESKGEITKRISVFDINYKNLGKIFDKDGSQKEIYETLVKWLEAKSKDYPKLKNGNIIKKVKIVDGNKDKLIKLGNKRYVEMGRTTVKILVLKKEAEEGLKFASIGRYKYNLLKSEKDVNISIWKDAIHFCKVRYNKLKENGYRLIHELIPGETIELELNKGNISKCLVVGFSGGKIEISSVIGDALDLINDKISTRIKERYYITVSTIKSIKKINKNILGD

SEQ ID NO: 123 - protein, 1091 aa, Mobiluncus mulieris
MDSRKYRVGIDVGTNSVGFAAVEEDDSGSPTRFLNTMVVIHDSGVDPEQKKYAITRLASAGTARRTRRLYRTRRQRLRELDDFISNELGYPLVNLENFADPYEPWKVRADLATTKLPNDELPEAMSIALRHMARHRGWRSPYQRVEALHLHAEISKEFAALKERVVEKTGDVFSDDATPAEVLVDLMGRQKVRGADGVLSGKLRQSDNANELRKIASVQGIDDETLNRIIDRVFSSKSPKGKASERVGMDALPGQGSKPRALKAMPSFQKFRVVSVICNLRIKDSGGDARPLSMEEKEKLIDYLMSSTTDDHVTWTDVADLLHVKRSQLQGTAKEGFDGERPYTRPPVNSTWSKIKDSKIKSLVALWKTGDVDVQSAIVEALSNASVLEDSRPGADIVVAYLESLDDKELESLDKVGLPAGRASYSEDSLERLTERMLRDDCDLFEARKREFNVADDWKPPADPIYAPVGNPGVDRVLKIVNRLLMAAEREWGAPTQINIEHVRSGFSSELMQREFERENERRRAQNEEAVKAILTEKGGNSRVSKYDITRYYAVKRQHCQCLYCGTPITFSDCELDHIVPRKGVGSTNTRVNLAAACRSCNRDKSNLPFAVWAGKASNFDVSIDDAVSRVKQWQRSQNEGVREFRAFQNEVISRLLKTTEDPEIDSRSLESVAWMARELHHRVEYYFQSKGAQTQVSVYRGAVTAQARKSSGLEDKVKMIGGGGKTRLDRRHHAMDAATIALMTPGISTTLSEKNNLRDAQKFTGQSETWKDYCGRTETARKHFAVWKSNMERLTDLFNDKLENDAIPVVQPLRLRLSNSKAHDDGIGKLDSKKLGSVWSLADIDRAATPQIWTALTRCDDFDPTKGLPENANRVIRAQGVKYESEDNIPVFPSNVAAIAVRDGYAEIGSTIHHARIYRIDDGKKTFYSMIRVFAVDLLKHQAEDLFTVKLPPSAISIRTCEDSLRRALSNGTAEYLGWLVPGDEIIVDTSDKAFHTGQIGDLLRNFPVNSFRLTGFPSNSRLRLKPVLLAGEGLRDDAEDSIKKILLGQGWRPAINVLFSKGKPRIVRRNSLGIERPSSNNGLPFSWEA

SEQ ID NO: 124 - protein, 872 aa, Candidatus Parvarchaeum
MLGSSRYLRYNLTSFEGKEPFLIMGYYKEYNKELSSKAQKEFNDQISEFNSYYKLGIDLGDKTGIAIVKGNKIILAKTLIDLHSQKLDKRREARRNRRTRLSRKKRLARLRSWVMRQKVGNQRLPDPYKIMHDNKYWSIYNKSNSANKKNWIDLLIHSNSLSADDFVRGLTIIFRKRGYLAFKYLSRLSDKEFEKYIDNLKPPISKYEYDEDLEELSSRVENGEIEEKKFEGLKNKLDKIDKESKDFQVKQREEVKKELEDLVDLFAKSVDNKIDKARWKRELNNLLDKKVRKIRFDNRFILKCKIKGCNKNTPKKEKVRDFELKMVLNNARSDYQISDEDLNSFRNEVINIFQKKENLKKGELKGVTIEDLRKQLNKTFNKAKIKKGIREQIRSIVFEKISGRSKFCKEHLKEFSEKPAPSDRINYGVNSAREQHDFRVLNFIDKKIFKDKLIDPSKLRYITIESPEPETEKLEKGQISEKSFETLKEKLAKETGGIDIYTGEKLKKDFEIEHIFPRARMGPSIRENEVASNLETNKEKADRTPWEWFGQDEKRWSEFEKRVTSLYSKKKISERKREILLNKSNEYPGLNPTELSRIPSTLSDFVESIRKMFVKYGYEEPQTLVQKGKPIIQVVRGRDTQALRWRWHALDSNIIPEKDRKSSFNHAEDAVIAACMPPYYLRQKIFREEAKIKRKVSNKEKEVTRPDMPTKKIAPNWSEFMKTRNEPVIEVIGKVKPSWKNSIMDQTFYKYLLKPFKDNLIKIPNVKNTYKWIGVNGQTDSLSLPSKVLSISNKKVDSSTVLLVHDKKGGKRNWVPKSIGGLLVYITPKDGPKRIVQVKPATQGLLIYRNEDGRVDAVREFINPVIEMYNNG

SEQ ID NO: 125 - protein, 1229 aa, Pediococcus acidilactici
MGDRKYNLGLDIGTSSIGFAAVDENNQPIRVKGKTAIGVRLFEEGKTAADRRGFRTTRRRLSRRRWRINLLNEIFDAHLAEVDPTFLARLKESNRSNLDPKKSFQGSLLFPERKDYQFYEEYPTIYHLRKALMEKDRKFDIREIYLAVHHIIKYRGNFLNGTPMRSFKVENIELNTLFDQLNQLYAEIVPDNELAFDLAQVADVKDVLSSTTIYKMDKKKQLVKMMLLPASNKALQSENKKIVTQFVNAILNYKFKLDVLLQVETDADWSLKLNDEGADDKLEEFTGDLDENRLEIIDLLQRLHNWFSLNEITKDGNSLSAAMVEKYENHHHHLGLLKKVIENHPDAKKAKALKETYTAYVGKTDDKTQNQDDFYKAVEKNLDDSPDAKGIKRLIQLDQFMPKQRTGQNGAIPHQLHQQELDQIIEKQSKYYPFLAEPNPNVKRRKDAPYKLDELIAFKIPYYVGPLVTPEEQAQNKENVFAWMKRKAAGPITPWNFDEKVDRMESANRFIRRMTTKDTYLFGEDVLPAESMIYQKFVVLNELNNLKINGRHLSLKDKQDVYNDLFKQQKTVSIKALQNYYVTKKKAATAPTVGGLADPKKFLSSLSTYIDFKNMFGERVNDPQFQEDLEQIVEWSTIFEDRGIFKAKLQALGWLSEKQIQQLVAKRYKGWGRLSKKLLTGLKNAEGYSILDEMWRSTENFMQIQSRPEFAALIQQANEKQFEGNDPDNVWENIENILGDAYTSPQNKKAIRQVVKVVQDIEKAVGNPPEKIAIEFTREAAANPQRTQSRLRTLEKLYESAEEVVDAGLTAELAEFKENKHVLSDKYYLYFTQLGRDVYTGDTISLDKLNDYDVDHILPQSFIKDDSLDNRVLTIRAVNNGKSDNVPAKMFGKKMGSFWRHLLDNGMISKRKYNNLITDPDNISKYAQKGFINRQLVETSQVIKLTANILNGIYDKDTEIIEVPAKMNSQMRKMFDLVKVREVNDYHHAFDAYLTIFIGNYLYKCYPKLRPYFVYDNFKKFGNKEDIGHKRFNFLGKIEREKKVVAPETGEILWSNVAPNETIKQIKKVYNYKFMIVSREITTRRAELFNQTVYPKNYRGKLIPIKEDRPTDLYGGYSGNTDAYLAIVALEDKKKGKYFKVVGIPTRAAAKLEKLKQQDSQQYLQALHEVIAPQFTKSTKKGIKKTEFEIVLDKVHYRQLVQDGPVKMMLGSSTYKYNAKQLVLSEKAL

SEQ ID NO: 126 - protein, 1398 aa, Veillonella parvula
METQASNQLISSHLKGYPIKDYFVGLDIGTSSVGWAVTNKAYELLKFRSHKMWGSRLFDEGESAVARRGFRSMRRRLERRKLRLKLLEELFADAMAQVDPTFFMRLRESKYHYEDKTTGHSSKHILFIDKNYNDQDYFKEYPTVYHLRSELMKSGTDDIRKLFLAVHHILKYRGNFLYEGATFDSNASTLDDVIKQALENITFNCFDCNSAISSIGQILMEAGKTKSDKAKAIEHLVDTYIATDTVDTSSKTQKDQVKEDKKRLKAFANLVLGLNASLIDLFGSVEELEEDLKKLQITGDTYDDKRDELAKAWSDEIYIIDDCKSVYDAIILLSIKEPGLTISESKVKAFNKHKDDLAILKSLLKSDRSIYNTMFKVDEKGLHNYVHYIKQGRTEETSCNREDFYKYTKKIVEGLSDSKDKEYILSQIELQILLPLQRIKDNGVIPYQLHLEELKAILAKCGPKFPFLNEVADGFSVAEKLIKMLEFRIPYYVGPLNTHHNVDNGGFAWAVRKASGRVTPWNFDDKIDREKSAAAFIKNLTNKCTYLLGEDVLPKSSLLYSEFMLLNELNNVRIDGKPLEKVVKEHLIEAVFKQDHKKMTKNRIEQFLKDNGYISETHKHEITGLDGEIKNDLASYRDMVRILGDGFDRSMAEEIITDITIFGESKKMLRETLRKKFASCLDDEAIKKLTKLRYRDWGRLSQKLLNGIEGCDKAGDGTPETIIILMRNFSYNLMELLGDKFSFMERIQEINAKLTEGQIVNPHDIIDDLALSPAVKRAVWQALRIVDEVAHIKKALPARIFVEVTRSNKNEKKKKDSRQKRLSDLYAAIKKDDVLLNGLNNEIFGELKSSLAKYDDAALRSKKLYLYYTQMGRCAYTGEIIELSLLNTDNYDIDHIYPRSLTKDDSFDNLVLCKRTANAQKSDAYPISEEIQKTQKPFWTFLKQQGLISERKYERLTRITPLTADDLSGFIARQLVETNQSVKAATTLLRRLYPGVDVVFVKAENVTDFRHDNNFIKVRSLNHHHHAKDAYLNIVVGNVYHERFTRNFRAFFKKNGANRTYNLAKMFNYDVNCTNAKDGKAWDVKTSMDTVKKMMDSNDVRVTKRLLEQTGALADATIYKATVAGKAKDGAYIGMKTKSSVFADVSKYGGMTKIKNAYSIIVQYTGKKGEVIKEIVPLPIYLTNRNTTDQDLINYVASIIPQAKDISIIYGKLCINQLVKVNGFYYYLGGKTNSKFCIDNAIQVIVSNEWIPYLKVLEKFNNMRKDNKDLKANVVSTRALDNKHTIEVRIVEEKNIEFFDYLVSKLKMPIYQKMKGNKAAELSEKGYGLFKKMSLEEQSIHLIELLNLLTNQKTTFEVKPLGITASRSTVGSKISNQDEFKVINESITGLYSNEVTIV

SEQ ID NO: 127 - protein, 1485 aa, Prevotella bivia
MKNILGLDLGTNSIGWAKISIDDNGKYIKDSIKLGSRIIPMSQDVLSNFSKGVTLSQTSERTSFRGARRLRERTLLRRERLHRILHLLGFLPKHYEKAIGWDRNDNKTYGKFINHAEPKLAWCKDNNGKMRFLFMDSFHDMLSEFSEKHPELLANGKKIPLDWTIYYLRKKALYKAITKEELAWILLNFNQKRGYYQLRGEEDRDSEANKKEYLELKVIGVEATGEKKGNDIWYNIHLENGWIYRRSSKNPLNDWLGKVKSFIVTTDLDADGNPKKDKDGNIKRSFRAPSEGDWTLIKKRTESLLENSGQTVGQFIYNHILEEPSAKIRGNFIRTIERKYYKDELKAILEKQKEFHHELSSESLLTECAKELYKRNIAHQEVLLKKGIIHLLLNDILFYQRPLKIKKSLIDNCPYENYKYVDKKSGDIKVKSIKCIAKSNPFFQEFRLWQFVSNLRLYRKSDDKDVTSEHLVTTDDYANLFTYLNNRKDIKQSVLLKEYFKIKKVKTINGAEYPVRWNYIDDDNKTYPCNETRYDILHALSKTELKSEWLTPERTYRLWHLLYSIESKEETKKALNKLNLSDDFTEAFLTIKPFKKEYGSYSEKAIKKLLSLMRMGYLWSEDEAIKQVGAEIEKTIEGELPDYVLQRLEKSQHNYNKISDFSGLPLWLASYIIYGRHSEAKEIIHWDNPESMMAYIKDFRQHSMRNPIVEQCVLETLRTVHDIWKEIGHIDEIHIELGREMKSTSEQRKAITQNVLHNQNTNIRIKLLLQELKNDNNITGVRPYSPMQQEILRIYEEGALQGLTKEDKDYNDILKISQTAQPTSNELTRYKLWLEQKYRSPYTGKAISLSKLFTSAYQIEHVIPQSRYFDDSLSNKVICESEVNTLKKAMLGMEFIKTCGGQKVHCTLLGDVEIYNEEDYKAFVNEHYSNNRTKRNKLLMEDIPQEFINRQLNDSRYISKMVKQLLSAIVRGQEEVEATSKFVIPCTGGITDRLKKDWGLNDIWNNLVSPRFQRMNALTGSEYFGHWENKEGKRVFQTTMPIQLQQGFSKKRIDHRHHAMDALVIACASRNIISYLNNETAQDTERRRDLRQKLCDKGGSVRKPWDSFTQDTQYALKDIIVTFKNYVRIINKATNYYEHYKTDGKKGMISQKGDELWAIRKPMHKETVFGKVNLRRPKRVSLSKAIDSVDIICNRKLKKYIKARLNEGLQKKQILNIFKELNNVWEGIDVNKIDIWEMSNDKEPMVATRKQLDTSFDEKKIRSISDTGIQKILLNYLITKNNNPELAFTPEGIQEMNSNISEYNDHKKHQPIYKVRVTEPLGAKYPIGTMGNNPKKFVEAQAGTNLYFAIYEDKEGKRNYDTIPLNIAAERLNQQLSPVPETNENNTPLKFYLSPNDLVYVPSEEERHSGNNIQLDKNRIYKMVSSTSKRCFFIHHRVAISLVDKKEFSAQNKMERSIDNEQVMIKSVCWKLITDRLGNIIKVIK

SEQ ID NO: 128 - protein, 1218 aa, Prevotella buccalis
MNKRILGLDTGTNSLGWAVVDWDEHAQSYELIKYGDVIFQEGVKIEKGIESSKAAERSGYKAIRKQYFRRRLRKIQVLKVLVKYHLCPYLSDDDLRQWHLQKQYPKSDELMLWQRTSDEEGKNPYYDRHRCLHEKLDLTVEADRYTLGRALYHLTQRRGFLSNRLDTSADNKEDGVVKSGISQLSTEMEEAGCEYLGDYFYKLYHEQGNKVRIRQRYTDRKKHYQHEFDAICEKQELSSELIEDLQRAIFFQLPLKSQRHGVGRCTFERGKPRCADSHPDYEEFRMLCFVNNIQVKGPHDLELRPLTYEEREKIEHLFFRKSKPNFDFEDIAKELAGKKNYAWIHDKEERAYKFNYRMTQGVPGCPTTAQLKSIFGDDWKTGIAETYTLIQKKNGSKSLQEMVDDVWNVLYSFSSVEKLKEFAHHKLQLDEENAEKFAKIKLSHSFAALSLKAIRKFLPFLRKGMYYTHASFFANIPTIVGKEIWNNEQSRKYIMENVGELVFNYQPKHRDVQGTIEMLIKDFLANNFELPAGATDKLYHPSMIETYPHALRNEFGILQLGSPRTNAIRNPMAMRSLHVLRRVVNQLLKESIIDENTEVHVEYARELNDANKRRAIADRQKEQDKQHKKYGDEIRKLYKEETGKDIEPTQTDVLKFQLWEEQNHYCLYTGEQIGITDFIGSNPKFDIEHTIPQSVGGDSTQMNLTLCDNRFNREVKKAKLPTELANHEEILTRIEPWKNKYEQLVKERDKQRTFAGMDKAVKDIRIQKRHKLQMEIDYWRGKYERFTMTEVPEGFSRRQGTGIGLISRYAGLYLKSLFHQADSRNKSNVYVVKGVATAEFRKMWGLQSEYEKKCRDNHSHHCMDAITIACIGKREYDLMAEYYHMEETFRQGRGSKPKFSKPWATFTEDVLNIYKNLLVVHDTPNNMPKHTKKYVQTSKGKVLAQGDTARGSLHLDTYYGAIERDGEIRYVVRRPLSSFTNPKELENIVDETVKRTIKEAIADKNFKQAIAEPIYMNEDKGILIKKVRCFANSVKQPINIRQHRDLSKKEYKQQYHVMNENNYLLAIYEGLVKNKVVREFEIVSYIEAAKYYKRSQDRNIFSSIVPTHSTKYGLPLKTKLLMGQQVLMFEENPDEIQVDNTKDLVKRLYKVVGIEKDGRIKFKHHQEARKEGLTIYSTPYKNNDDYVPIFRQSIKNINILVDGIDFNIDILGKVTLKE

SEQ ID NO: 129 - protein, 1218 aa, Prevotella timonensis
MNKRILGLDTGTNSLGWAVVDWDEHAQSYELIKYGDVIFQEGVKIEKGIESSKAAERSGYKAIRKQYFRRRLRKIQVLKVLVKYHLCPYLSDDDLRQWHLQKQYPKSDELMLWQRTSDEEGKNPYYDRHRCLHEKLDLTVEADRYTLGRALYHLTQRRGFLSNRLDTSADNKEDGVVKSGISQLSTEMEEAGCEYLGDYFYKLYDAQGNKVRIRQRYTDRNKHYQHEFDAICEKQELSSELIEDLQRAIFFQLPLKSQRHGVGRCTFERGKPRCADSHPDYEEFRMLCFVNNIQVKGPHDLELRPLTYEEREKIEPLFFRKSKPNFDFEDIAKALAGKKNYAWIHDKEERAYKFNYRMTQGVPGCPTIAQLKSIFGDDWKTGIAETYTLIQKKNGSKSLQEMVDDVWNVLYSFSSVEKLKEFAHHKLQLDEESAEKFAKIKLSHSFAALSLKAIRKFLPFLRKGMYYTHASFFANIPTIVGKEIWNKEQNRKYIMENVGELVFNYQPKHREVQGTIEMLIKDFLANNFELPAGATDKLYHPSMIETYPNAQRNEFGILQLGSPRTNAIRNPMAMRSLHILRRVVNQLLKESIIDENTEVHVEYARELNDANKRRAIADRQKEQDKQHKKYGDEIRKLYKEETGKDIEPTQTDVLKFQLWEEQNHHCLYTGEQIGITDFIGSNPKFDIEHTIPQSVGGDSTQMNLTLCDNRFNREVKKAKLPTELANHEEILTRIEPWKNKYEQLVKERDKQRTFAGMDKAVKDIRIQKRHKLQMEIDYWRGKYERFTMTEVPEGFSRRQGTGIGLISRYAGLYLKSLFHQADSRNKSNVYVVKGVATAEFRKMWGLQSEYEKKCRDNHSHHCMDAITIACIGKREYDLMAEYYRMEETFKQGRGSKPKFSKPWATFTEDVLNIYKNLLVVHDTPNNMPKHTKKYVQTSIGKVLAQGDTARGSLHLDTYYGAIERDGEIRYVVRRPLSSFTKPEELENIVDETVKRTIKEAIADKNFKQAIAEPIYMNEEKGILIKKVRCFAKSVKQPINIRQHRDLSKKEYKQQYHVMNENNYLLAIYEGLVKNKVVREFEIVSYIEAAKYYKRSQDRNIFSSIVPTHSTKYGLPLKTKLLMGQLVLMFEENPDEIQVDNTKDLVKRLYKVVGIEKDGRIKFKYHQEARKEGLPIFSTPYKNNDDYAPIFRQSINNINILVDGIDFTIDILGKVTLKE

SEQ ID NO: 130 - protein, 1487 aa, Prevotella timonensis
MKNILGLDLGSNSVGWALVKVEENGNPIGSIKMGSRIIPMSQDILGSFEKGDTVSQTAQRTLYRGKRRLIERHVLRRERLCRVLHIMNFLPAHFDRLLGWDKTDNKTYGKFIDDSEPKLAWRQNKNEMGKMEFVFMDSFHEMLSDFAKHQPQLIANGKKVPLDWTIYYLRKKALTQLISKEELAWILLNFNKKRGYYQLRGEEEEEQPTKKEEYKVLKVISVDADEGQKGNGIWYNIHLEDGGIYKKKSDIPLYDWVGKTLQLIVVTTYEKDGKTPKIFDSGKQNPSYRLPKEDDWGLVKKRTESQLQSSGKTVGAFIYDNILSKPDDKIRGNLVRTIERKYYKKELIEILQQQAKYHDELHNQNLLESCAKELYAHNDVHYNEVIKSNMINLLVNDIIFYQRPLKSKKSLIANCKYESYEYVDKETGEIKEMPIKCIAKSNPYYQEFRLWQFIHNLRLSDVVTREDVTAQYLSTPQDYCNLFTYLNDRKEIKQDILLKDFFKIKKVQIDKEKVFPIEWNYIKDATKSYPCNETRYELLSALKRAGMDKQWLDDTPNMQYRLWHLLYSVEEKEESAKALRKLYDDDKFVTSFLKIKPFNKCYGAYSEKAIKRLLTLMRMGKAWNEQAIDAKTLKCIQQIITDNVDSKLKEKIDDSRYVLHHVSDFQGLPTYLASYVIYGRHSEVTDIQCWDSPEDLLKFIRDFKQHSLRNPIVEQVILETLRVVYDIWKAEKHIDEIHVEVAREMKLTAQQRNEANLRNLNNEATNLRIKYLLEELKNDTFIKDVRPLSPIHQEKMRIYEQAVLGNLNKQDKDYDDIIKISKKEHPTNAELIRYKLWLEQRYCSPYTGKAISLSKLFTTAYEIEHIIPQSRYFDNSFNNKVICEAEVNKAKGNMLGYEFIKKQGGQKIYCTQLGKAVTILKEEAYKQFVNEHYAHNKRKRDNLLAENIPESFSSRQLNDTRYITKTIMSLLSNVVRQQSEEEATAKNLLPSSGSVTDRLKNDWGLKDVWNTIVTPRFERLNKLSGTNDFGEMKEENGNRYFQTNVPLEYEKGFKKKRIDHRHHAMDALVIACTTRNMVNYISNANANSPKQREDLRQLLCDKNRIINKPWDTFTQDALKALNDIVVSFKNNVRIINRATNRYQRYDKNGKKIIFSQKGDDMWAIRKSMHKETVFGRVNLIRKEVLPIAKALDNISAICNAQLRAYVNDLVDKHFNKKQLVAHFKSLNYKWNRQDVSKVEVWISSDNKTPMVAVRKPLDTSFDKKKIASITDTGIQTILLNYLESKGGDASVAFAPEGIQEMNSNIELYNNGKAHKPIKNVRLSEPLGAKYQVGERGAKTKKYVEADKGTNLFFAIYEDEEGKRYYYSVPLREAIERQKQKLSPVPEYNEKGVALKFYLSPNDLVYVPTEEERTMGTCHIDKARIYKMVSSTGCSCYFVPSTFAKVIVDKVELQSLNKMEKAITDECIKEVCWKLKVDRLGNIINVIK

SEQ ID NO: 131 - protein, 1138 aa, Bifidobacterium dentium
MLCRCHRRYRIGIDVGLMSVGLAAIEVDETGFPIRILNIQSVIHDGGIDPQLGKKKSISRKAISGVARRTRRMRRRKVVRLRQLDATLESLGFPIVEPDSLDTWEIWLTRAKLASSYIQDDETRKEDVSIALRHIARHRGWRNPYSNVESLFVDVAPSEQYEELRRKAEEKLGTSLSGNPTSAEIVECILKRQVGEVQLRTRSRKGVNGNAVEKEGLLPTKLMQSDNAAEIRRIFKVQRIDDETGRKLLRAVFKACSPKGSVERRVGRDALAPGLPRALKASLAFQEYRIANVLTNLVISEDGTKRKLTIAEKQRVFGFLSSNETDDITWIDVAEKLGLERRQIQGVGCLTADGEERISSTPPRNITALHIHSAKPVIREKLVAWWKAASPTVRETMVELLSNTVDIDRVREDMDYSSAVAFIDSLGDEELTALDSVDLLSGRAAYSRQTLKQLTERMLNTDDDLHEARKAVFGVDDNWKPPVDAISTSVGNPAVDRVLKIVNRYLLACQKRWRNPQSVQIEHVRESFSSVAKAKETERVQGERARYRNDLRRELCEQEGLNKIRESDIRRWESVQRQNGTCLYCGSPITFRTCEMDHIVPRKGVGSTNTRVNLAAACAACNKLKSNTAFSVWARTEGAANRKVSQRDAIERVKTFIFNKSVPPREQRAFKQAVISRLRQAESDPAIDNRSIESVAWMADELHRRIEAYFNQDADVSGNTPATQVWVFQGRVTALARKASGIEGRIHFAGEWKKTRLDRRHHAVDAAVIAMMNHSAAQTLVERDSLRLSQWITRKPETWKNYPFSEGQKKTRFKEWLDCMNALLDLLNDALDSDRVPVTRCQRMSLGNSQAHAATIRKMKRVELFSPMDADLIRRASTPALYCALTRLPEYSPEKGLPENRGREIVLNGRHIRSTETVDFFASGAAQLMVRNGSAEIGDSIHHMRIYRYRKTGAKSQEYVYGMIRVFQIDLLHASSENLFAVQLPSQSVSVRYGDKNVVQAIQEGRAEYLGHIVPNDEILISYEGVRMKDSEKIGAYANDFSGTASELAQRRHWVVVGSDVSKLALRPSYLSEEGLENSGSESERLSKQTRKVIEGKGWVVAVNILAKYHPVVIRRNALGEPRFRTNSGMPVSWRWDR

SEQ ID NO: 132 - protein, 587 aa, Neisseria subflava
MATSRSRIRSQTDAFGVVGSLVAFNQTSRLFVAKKNEGETADKELGALLKGVADNAHALQTGNFRTPAELALNKFEKESGHIRNQRGDYSHTFNRKDLQAELNLLFEKQKEFGNPHVSDGLKEGIETLLMAQRPALSGDAVQKMLGYCTFEPTEPKAAKNTYTAGRFIWLTKLNNLRILEQGSERPLTTTERATLMDEPYRKSKLTYAQARKLLGLEDTAFFKGLRYGKDNAEASTLMEMKAYHAISRALEKEGLKDKKSPLNLSPELQDEIGTAFSLFKTDEDITGRLKDRVQPEILEALLKHISFDKFVQISLKALRRIVPLMEQGKRYDEACAEIYGDHYGKKNAEEKIYLPPIPADEIRNPVVLRALSQARKVINAVVRRYGSPARIHIETAREVGKSFKDRKEIEKRQEENRKDREKAAAKFREYFPNFVGEPKSKDILKLRLYEQQHGKCLYSGKEINLGRLNEKGYIEIDHALPFSRTWDDSFNNKVLVLGSENQNKGNQTPYEYFNGKDNSREWQEFKARVETSRFPRSKKQRILLQKFDEDGIYRIGVKTALSFPKYQIDELGKEIRPCRLKKRPPVR

SEQ ID NO: 133 - protein, 1269 aa, Mycoplasma gallisepticum
MNNSIKSKPEVTIGLDLGVGSVGWAIVDNETNIIHHLGSRLFSQAKTAEDRRSFRGVRRLIRRRKYKLKRFVNLIWKYNSYFGFKNKEDILNNYQEQQKLHNTVLNLKSEALNAKIDPKALSWILHDYLKNRGHFYEDNRDFNVYPTKELAKYFDKYGYYKGIIDSKEDNDNKLEEELTKYKFSNKHWLEEVKKVLSNQTGLPEKFKEEYESLFSYVRNYSEGPGSINSVSPYGIYHLDEKEGKVVQKYNNIWDKTIGKCNIFPDEYRAPKNSPIAMIFNEINELSTIRSYSIYLTGWFINQEFKKAYLNKLLDLLIKTNGEKPIDARQFKKLREETIAESIGKETLKDVENEEKLEKEDHKWKLKGLKLNTNGKIQYNDLSSLAKFVHKLKQHLKLDFLLEDQYATLDKINFLQSLFVYLGKHLRYSNRVDSANLKEFSDSNKLFERILQKQKDGLFKLFEQTDKDDEKILAQTHSLSTKAMLLAITRMTNLDNDEDNQKNNDKGWNFEAIKNFDQKFIDITKKNNNLSLKQNKRYLDDRFINDAILSPGVKRILREATKVFNAILKQFSEEYDVTKVVIELARELSEEKELENTKNYKKLIKKNGDKISEGLKALGISEDEIKDILKSPTKSYKFLLWLQQDHIDPYSLKEIAFDDIFTKTEKFEIDHIIPYSISFDDSSSNKLLVLAESNQAKSNQTPYEFISSGNAGIKWEDYEAYCRKFKDGDSSLLDSTQRSKKFAKMMKTDTSSKYDIGFLARNLNDTRYATIVFRDALEDYANNHLVEDKPMFKVVCINGSVTSFLRKNFDDSSYAKKDRDKNIHHAVDASIISIFSNETKTLFNQLTQFADYKLFKNTDGSWKKIDPKTGVVTEVTDENWKQIRVRNQVSEIAKVIEKYIQDSNIERKARYSRKIENKTNISLFNDTVYSAKKVGYEDQIKRKNLKTLDIHESAKENKNSKVKRQFVYRKLVNVSLLNNDKLADLFAEKEDILMYRANPWVINLAEQIFNEYTENKKIKSQNVFEKYMLDLTKEFPEKFSEFLVKSMLRNKTAIIYDDKKNIVHRIKRLKMLSSELKENKLSNVIIRSKNQSGTKLSYQDTINSLALMIMRSIDPTAKKQYIRVPLNTLNLHLGDHDFDLHNMDAYLKKPKFVKYLKANEIGDEYKPWRVLTSGTLLIHKKDKKLMYISSFQNLNDVIEIKNLIETEYKENDDSDSKKKKKANRFLMTLSTILNDYILLDAKDNFDILGLSKNRIDEILNSKLGLDKIVK

SEQ ID NO: 134 - protein, 1354 aa, Prevotella melaninogenica
MADFAKYQPGMVADGRKIPLDWTLYYLRKKALTQAIRKEELAWILLNFNQKRGYYQLRGEEEEENSTKHEEYYELKVVSVEAAEEGKGGNTWYNVTLENGWIYRRQSKIELNDWVGKVRPFIVTTEYEIDGVTIKKDKNGEVKRSFRAPSENDWGLRKKRTESLLEESGKTVGAFIYNHILSEPADKIRGNFIRTIERKFYKKELEAILREQSKHQKELKDIDTLIACIKELYPNNKPHQDSLIKKDMTYLLITDLIFYQRPLKSKKSLIADCPYEYYEYVIKETGENKRQSIKCIAKSNPYYQEFRLWQFIINLRLFDRNNDKEVTSEYLSSMEDYTRLFTYLNDRKDINQETLLKDFFKQKKVKRGMEKEFPIRWNYIEDKEKKYPCNETRHELLTALGKVGIDHSWLDDKELFYRLWHLLYSVESKEEAEGALRKLVDNDDFVNAFLKIKPFKKEYGAYSEKAIKKLLAVMRMGNLWNEVDICEQTRDRIQNIIKGDIDEKIKDRMGRTFSQLSDFQGLPEWLACYVVYGQHSEATDIQRWTKPENLMAYINGFKQHSLRNPIVEQCILETLRTVHDIWKEAGHIDEIHIELGRGMKSTADQRARMSKSIMQNENTNLRIKSLLMELKNAKEFENVRPYSPMQQEILRIYEEGALQELTKEDAQYNEISKISQMAQPSANELLKYRLWLEQKYCSPYTGKPISLSKLFTSAYQIEHIIPQSRYFDDSFTNKVICEAEVNQLKSNMLGYEFIKKHGGEIVRCTMIGDVKLLDAKEYYNFVTEHYTNNRRKKEKLLMEDIPQEFLNRQMNDSRYISKKVMAILSNIVREEDEQEAKSKFVIACSGGITDRLKQDWGLNDVWNSIVYPRFERLNKLTNTENFGRWENKKGKQVFQTSVPLELQKDFSKKRIDHRHHAMDALVIACASNNIINYLNNESAKSQEKREDLRKKLCDKNRIIRKPWETFTQDAHTALENVVVSFKNYIRVINKATNYYEKYDKNGKKEIAEQKGQDMWAIRKPMHKETVFGQVNLRRKITIKLKDALEKIPAICDKELRDYINILVAKQFNKKQILAHFKSINYRLNMKSVDKVDVWQFSNEKEPMVATRKSVDTSFDTKRIATITDTGIQKILLNYLKAKNNDPNIAFTPEGIAEMNKHITEYNNGKQHQPILKVRVSEPKGAKYQVGETGNKRSKFVEAQKGTNLYFAIYEDKEGNRSYNTIPLNEVIERLKQGLSPVPDANEKSIPLKFHLSPNDLVYVPKTDEENEIKMGQIYKFVDSSGTTANFVPHRVSNLIYNVDKKIAENFCNHEIIQNEYGIGSPQSKNQKSITGEMIKAVCWKLEVDRLGNIHKIIK

SEQ ID NO: 135 - protein, 1130 aa, Streptococcus gallolyticus
MTNGKILGLDIGIASVGVGIIEAKTGKVVHANSRLFSAANAENNAERRGFRGSRRLNRRKKHRVKRVRDLFEKYEIVTDFRNLNLNPYELRVKGLTEQLTNEELFAALRTISKRRGISYLDDAEDDSTGSTDYAKSIDENRRLLKTKTPGQIQLERLEKYGQLRGNFTVYDENGEAHRLINVFSTSDYEKEARKILETQADYNKKITAEFIDDYVEILTQKRKYYHGPGNEKSRTDYGRFRTDGTTLENIFGILIGKCSFYPDEYRASKASYTAQEYNFLNDLNNLKVPTETGKLSTEQKEALVEFAKSTATLGPAKLLKEIAKILDCKVDEIKGYREDDKGKPDLHTFEPYRKLKFNLDSVNIDDLSREVLDKLADILTLNTEREGIEDAIRHNLPNQFTEGQISEIIKVRKSQSTAFNKGWHSFSAKLMNELIPELYATSDEQMTILTRLEKFKVNKKSSKNTKTIDEKEVTDEIYNPVVAKSVRQTIKIINAAVKKYGDFDKIVIEMPRDKNADDEKKFIDKRNKENKKEKDDALKRAAYLYNGTDKLPDEVFHGNKQLETKIRLWYQQGERCLYSGKPIPIQELVHNSNNFEIDHILPLSLSFDDSLANKVLVYAWTNQEKGQKTPYQVIDSMDAAWSFREMKDYVLKQKGLGKKKRDYLLTTENIDKIEVKKKFIERNLVDTRYASRVVLNSLQSALRELGKDTKISVIRGQFTSQLRRKWKIDKSRETYHHHAVDALIIAASSQLKLWEKQDNPMFVDYGNNQVVDKQTGEILSVSDDEYKELVFQPPYQGFVNMISSKGFEDEILFSYQVDSKYNRKVSDATIYSTRKAKIGKDKKEETYVLGKIKDIYSQNGFDTFIKKYNKDKTQFLMYQKDPLTWENVIEVILRDYPTTKKSEDGKNDVKCNPFEEYRRENGLVCKYSKKGKGTPIKSLKYYDKKLGNCIDITPEGSKNEVVLQSLNPWRADVYFNPETLKYELLGLKYSDLSFEKGTGKYHISQEKYDVIKEKEGIGKKSEFKFTLYRNDLILIKDTASGEQEIYRFLSRTMPNVKHYAELKPYDKEKFDNVQELVEALGEADKVGRCIKGLNKSNLSIYKVRTDVLGNKYFVKKEGDKPKLDFKNNKK

SEQ ID NO: 136 - protein, 1371 aa, Streptococcus gallolyticus
MTEKNYSIGLDIGTNSVGWAVITDDYKVPAKKMKVLGNTDKKYIKKNLLGALLFDNGETAEATRLKRTARRRYTRRKNRLRYLQEIFAEEMAKVDESFFYRLDESFLTTDDKDFERHPIFGNKADEIKYHQEFPTIYHLRKHLADSHEKADLRLIYLALAHMIKFRGHFLIEGELNAENTDVQKLFEAFVEVYDRTFDDSNLSEITVDASSILTEKFSKSRRLENLIKHYPTEKKNTLFGNLVALALGLQPNFKTSFKLSEDAKLQFSKDTYEEDLEELIGKIGDEYADLFTSAKNLYDAILLSGILTVADNTTKAPLSASMIKRYNEHQVDLKKLKEFIKNNASDKYDEIFNDKDKNGYAGYIENGVKQDEFYKYLKTTLSKIDGSDYFLDKIEREDFLRKQRTFDNGSIPHQIHLQEMHAILRRQGEHYAFLKENQAKIEKILTFRIPYYVGPLARKNSRFAWAEYHSDEKITPWNFDEIIDKEKSAEKFITRMTLNDLYLPEEKVLPKHSLVYETYTVYNELTKVKYVNEQGKSNFFDANMKQEIFEHVFKENRKVTKDKFLNYLNKEFPEYRIQDLIGLDKENKSFNASLGTYHDLKKILDKSFLDDKTNETIIEDIIQTLTLFEDRDMIRQRLQKYSDIFTPQQLKKLERRHYTGWGRLSYKLINGIRNKENGKSILDYLIDDGYANRNFMQLISDDTLPFKQIIKDAQIIGDIDDVTSVVRELPGSPAIKKGILQSVKIVDELVKVMGHNPDNIVIEMARENQTTNRGRNQSQQRLKKLQDSLKELGSNILNEEKPSYIEGKVENNHLQDDRLFLYYIQNGKDMYTGDELDIDHLSDYDIDHIIPQAFIKDDSIDNRVLTSSAKNRGKSDDVPSLDIVHDRKADWIRLYKSGLISKRKFDNLTKAERGGLTENDKAGFIKRQLVETRQITKHVAQILDSRFNTERDENDKVIRNVKVITLKSNLVSQFRKDFKFYKVREINDYHHAHDAYLNAVVGTALLKKYPKLAPEFVYGEYKKYDIRKFITSSGDKATAKYFFYSNLMNFFKRVIRYSNGKVVVRPVIECSKDTGEIAWNKQTDFEKVRRVLSYPQVNIVKKVETQTGGFSKESILPKGNSDKLIPRKTKKFRWDTPKYGGFDSPNIAYSVFVIADVEKGKAKKLKTVKELVGISIMERSSFEENPVVFLEKKGYQNVQEDNLIKLPKYSLFEFEGGRRRLLASASELQKGNEVVLSRHLVELLYHAHRVNSFNNSEHLKYVSEHKKEFGEVLSCVENFAKSYVDVEKNLGKIRAVADKIDTFSIEDISISFVNLLTLTALGAPADFNFLGEKIPRKRYTSTKECLNATLIHQSITGLYETRIDLSKLGEE

SEQ ID NO: 137 - protein, 1168 aa, Unknown
  Azospirillum sp.B510
MARPAFRAPRREHVNGWTPDPHRISKPFFILVSWHLLSRVVIDSSSGCFPGTSRDHTDKFAEWECAVQPYRLSFDLGTNSIGWGLLNLDRQGKPREIRALGSRIFSDGRDPQDKASLAVARRLARQMRRRRDRYLTRRTRLMGALVRFGLMPADPAARKRLEVAVDPYLARERATRERLEPFEIGRALFHLNQRRGYKPVRTATKPDEEAGKVKEAVERLEAAIAAAGAPTLGAWFAWRKTRGETLRARLAGKGKEAAYPFYPARRMLEAEFDTLWAEQARHHPDLLTAEAREILRHRIFHQRPLKPPPVGRCTLYPDDGRAPRALPSAQRLRLFQELASLRVIHLDLSERPLTPAERDRIVAFVQGRPPKAGRKPGKVQKSVPFEKLRGLLELPPGTGFSLESDKRPELLGDETGARIAPAFGPGWTALPLEEQDALVELLLTEAEPERAIAALTARWALDEATAAKLAGATLPDFHGRYGRRAVAELLPVLERETRGDPDGRVRPIRLDEAVKLLRGGKDHSDFSREGALLDALPYYGAVLERHVAFGTGNPADPEEKRVGRVANPTVHIALNQLRHLVNAILARHGRPEEIVIELARDLKRSAEDRRREDKRQADNQKRNEERKRLILSLGERPTPRNLLKLRLWEEQGPVENRRCPYSGETISMRMLLSEQVDIDHILPFSVSLDDSAANKVVCLREANRIKRNRSPWEAFGHDSERWAGILARAEALPKNKRWRFAPDALEKLEGEGGLRARHLNDTRHLSRLAVEYLRCVCPKVRVSPGRLTALLRRRWGIDAILAEADGPPPEVPAETLDPSPAEKNRADHRHHALDAVVIGCIDRSMVQRVQLAAASAEREAAAREDNIRRVLEGFKEEPWDGFRAELERRARTIVVSHRPEHGIGGALHKETAYGPVDPPEEGFNLVVRKPIDGLSKDEINSVRDPRLRRALIDRLAIRRRDANDPATALAKAAEDLAAQPASRGIRRVRVLKKESNPIRVEHGGNPSGPRSGGPFHKLLLAGEVHHVDVALRADGRRWVGHWVTLFEAHGGRGADGAAAPPRLGDGERFLMRLHKGDCLKLEHKGRVRVMQVVKLEPSSNSVVVVEPHQVKTDRSKHVKISCDQLRARGARRVTVDPLGRVRVHAPGARVGIGGDAGRTAMEPAEDIS

SEQ ID NO: 138 - protein, 1345 aa, Streptococcus mutans
MKKPYSIGLDIGTNSVGWAVVTDDYKVPAKKMKVLGNTDKSHIKKNLLGALLFDSGNTAADRRLKRTARRRYTRRRNRILYLQEIFAEEMSKVDDSFFHRLEDSFLVTEDKRGERHPIFGNLEEEVKYHENFPTIYHLRQYLADNPEKVDLRLVYLALAHIIKFRGHFLIEGKFDTRNNDVQRLFQEFLAVYDNTFENSSLQEQNVQVEEILTDKISKSAKKDRVLKLFPNEKSNGRFAEFLKLIVGNQADFKKHFELEEKAPLQFSKDTYEEELEVLLAQIGDNYAELFLSAKKLYDSILLSGILTVTDVSTKAPLSASMIQRYNEHQMDLAQLKQFIRQKLSDKYNEVFSDVSKDGYAGYIDGKTNQEAFYKYLKGLLNKIEGSGYFLDKIEREDFLRKQRTFDNGSIPHQIHLQEMRAIIRRQAEFYPFLADNQDRIEKILTFRIPYYVGPLARGKSDFAWLSRKSADKITPWNFDEIVDKESSAEAFINRMTNYDLYLPNQKVLPKHSLLYEKFTVYNELTKVKYKTEQGKTAFFDANMKQEIFDGVFKVYRKVTKDKLMDFLEKEFDEFRIVDLTGLDKENKAFNASYGTYHDLRKILDKDFLDNSKNEKILEDIVLTLTLFEDREMIRKRLENYSDLLTKEQVKKLERRHYTGWGRLSAELIHGIRNKESRKTILDYLIDDGNSNRNFMQLINDDALSFKEEIAKAQVIGETDNLNQVVSDIAGSPAIKKGILQSLKIVDELVKIMGHQPENIVVEMARENQFTNQGRRNSQQRLKGLTDSIKEFGSQILKEHPVKHSQLQNDRLFLYYLQNGRDMYTGEELDIDYLSQYDIDHIIPQAFIKDNSIDNRVLTSSKENRGKSDDVPSKNVVRKMKSYWSKLLSAKLITQRKFDNLTKAERGGLTDDDKAGFIKRQLVETRQITKHVARILDERFHTETDENNKKIRQVKIVTLKSNLVSNFRKEFELYKVREINDYHHAHDAYLNAVIGKALLGVYPQLEPEFVYGDYPHFHGHKENKATAKKFFYSNIMNFFKKDDVRTDKNGEIIWKKDEHISNIKKVLSYPQVNIVKKVEEQTGGFSKESILPKGNSDKLIPRKTKKFYWDTKKYGGFDSPIVAYSILVIADIEKGKSKKLKTVKALVGVTIMEKMTFERDPVAFLERKGYRNVQEENIIKLPKYSLFKLENGRKRLLASARELQKGNEIVLPNHLGTLLYHAKNIHKVDEPKHLDYVDKHKDEFKELLDVVSNFSKKYTLAEGNLEKIKELYAQNNGEDLKELASSFINLLTFTAIGAPATFKFFDKNIDRKRYTSTTEILNATLIHQSITGLYETRIDLSKLGGD

SEQ ID NO: 139 - protein, 1024 aa, Helicobacter mustelae
MIRTLGIDIGIASIGWAVIEGEYTDKGLENKEIVASGVRVFTKAENPKNKESLALPRTLARSARRRNARKKGRIQQVKHYLSKALGLDLECFVQGEKLATLFQTSKDFLSPWELRERALYRVLDKEELARVILHIAKRRGYDDITYGVEDNDSGKIKKAIAENSKRIKEEQCKTIGEMMYKLYFQKSLNVRNKKESYNRCVGRSELREELKTIFQIQQELKSPWVNEELIYKLLGNPDAQSKQEREGLIFYQRPLKGFGDKIGKCSHIKKGENSPYRACKHAPSAEEFVALTKSINFLKNLTNRHGLCFSQEDMCVYLGKILQEAQKNEKGLTYSKLKLLLDLPSDFEFLGLDYSGKNPEKAVFLSLPSTFKLNKITQDRKTQDKIANILGANKDWEAILKELESLQLSKEQIQTIKDAKLNFSKHINLSLEALYHLLPLMREGKRYDEGVEILQERGIFSKPQPKNRQLLPPLSELAKEESYFDIPNPVLRRALSEFRKVVNALLEKYGGFHYFHIELTRDVCKAKSARMQLEKINKKNKSENDAASQLLEVLGLPNTYNNRLKCKLWKQQEEYCLYSGEKITIDHLKDQRALQIDHAFPLSRSLDDSQSNKVLCLTSSNQEKSNKTPYEWLGSDEKKWDMYVGRVYSSNFSPSKKRKLTQKNFKERNEEDFLARNLVDTGYIGRVTKEYIKHSLSFLPLPDGKKEHIRIISGSMTSTMRSFWGVQEKNRDHHLHHAQDAIIIACIEPSMIQKYTTYLKDKETHRLKSHQKAQILREGDHKLSLRWPMSNFKDKIQESIQNIIPSHHVSHKVTGELHQETVRTKEFYYQAFGGEEGVKKALKFGKIREINQGIVDNGAMVRVDIFKSKDKGKFYAVPIYTYDFAIGKLPNKAIVQGKKNGIIKDWLEMDENYEFCFSLFKNDCIKIQTKEMQEAVLAIYKSTNSAKATIELEHLSKYALKNEDEEKMFTDTDKEKNKTMTRESCGIQGLKVFQKVKLSVLGEVLEHKPRNRQNIALKTTPKHV

SEQ ID NO: 140 - protein, 765 aa, Butyrivibrio fibrisolvens
MGITIGLDLGVASVGWAVVNDDYEILESCSNIFPSADASKNSERRGFRQGRRLTRRRKNRIHDFQKLWEDKGFVIPSQGTEDVLAIKIKGLSEKLSVDEVYWVLLNSLKHRGISYLDDADSGDNSSDYAKSISRNEEELKEKLPCEIQWERLQKYGAYRGNISIVEDGEPITLRNVFTTSAYKKEVEQFIDTQAKYNAQYSGDFKADYLEIFNRKREYYEGPGNELSRTDYGKYTTEINADGEYITVDNIFDKLVGKCSVNPDERRAAGASYTAQEFNVLNDLNNLTISSESSFIEDGKLTEDAKRKIIETIKNAKTVNVKKIICDVIGDKKCQISGARIDKNEKEIFHSFEAYNKMRRALEEIGFDISSLSRENLDLIGDILTLNTDRESILNAFNRKGIELADEAKDILVKVRKTNGSLFNKWQSFGLSIMNELIPELYAQPKNQMELLTAMGVFKSRGDRFLECKEIPGDLIVDDIYNPVVSKTVRITVRILNALIKKYGYPDRVVIEMPRDKNSDEEQQRLKKEQRDNENEIKDIKARVKTEYGREITEEDFRQHSKLSLKLKLWNEQQGICPYSGKSIKIDDLLDNPNLFEVDHIIPLSISFDDSRNNKVLVYSSENQDKGNRTPLAYLASVNRQWDIHSFMDYVLKTYAGAQKRKKRDNLLNEQDITKVEVLQGFVNRNINDTRYASKVVLNSLQEYFSSKECSTKVKVIRGSFTHQMRVNLKLKKTVMNHMFIMQLMQCLLLFHRWDMTLIMNLQISI

SEQ ID NO: 141 - protein, 1338 aa, Coprococcus catus
MKQEYFLGLDMGTGSLGWAVTDSTYQVMRKHGKALWGTRLFESASTAEERRMFRTARRRLDRRNWRIQVLQEIFSEEISKVDPGFFLRMKESKYYPEDKRDAEGNCPELPYALFVDDNYTDKNYHKDYPTIYHLRKMLMETTEIPDIRLVYLVLHHMMKHRGHFLLSGDISQIKEFKSTFEQLIQNIQDEELEWHISLDDAAIQFVEHVLKDRNLTRSTKKSRLIKQLNAKSACEKAILNLLSGGTVKLSDIFNNKELDESERPKVSFADSGYDDYIGIVEAELAEQYYIIASAKAVYDWSVLVEILGNSVSISEAKIKVYQKHQADLKTLKKIVRQYMTKEDYKRVFVDTEEKLNNYSAYIGMTKKNGKKVDLKSKQCTQADFYDFLKKNVIKVIDHKEITQEIESEIEKENFLPKQVTKDNGVIPYQVHDYELKKILDNLGTRMPFIKENAEKIQQLFEFRIPYYVGPLNRVDDGKDGKFTWSVRKSDARIYPWNFTEVIDVEASAEKFIRRMTNKCTYLVGEDVLPKDSLVYSKFMVLNELNNLRLNGEKISVELKQRIYEELFCKYRKVTRKKLERYLVIEGIAKKGVEITGIDGDFKASLTAYHDFKERLTDVQLSQRAKEAIVLNVVLFGDDKKLLKQRLSKMYPNLTTGQLKGICSLSYQGWGRLSKTFLEEITVPAPGTGEVWNIMTALWQTNDNLMQLLSRNYGFTNEVEEFNTLKKETDLSYKTVDELYVSPAVKRQIWQTLKVVKEIQKVMGNAPKRVFVEMAREKQEGKRSDSRKKQLVELYRACKNEERDWITELNAQSDQQLRSDKLFLYYIQKGRCMYSGETIQLDELWDNTKYDIDHIYPQSKTMDDSLNNRVLVKKNYNAIKSDTYPLSLDIQKKMMSFWKMLQQQGFITKEKYVRLVRSDELSADELAGFIERQIVETRQSTKAVATILKEALPDTEIVYVKAGNVSNFRQTYELLKVREMNDLHHAKDAYLNIVVGNAYFVKFTKNAAWFIRNNPGRSYNLKRMFEFDIERSGEIAWKAGNKGSIVTVKKVMQKNNILVTRKAYEVKGGLFDQQIMKKGKGQVPIKGNDERLADIEKYGGYNKAAGTYFMLVKSLDKKGKEIRTIEFVPLYLKNQIEINHESAIQYLAQERGLNSPEILLSKIKIDTLFKVDGFKMWLSGRTGNQLIFKGANQLILSHQEAAILKGVVKYVNRKNENKDAKLSERDGMTEEKLLQLYDTFLDKLSNTVYSIRLSAQIKTLTEKRAKFIGLSNEDQCIVLNEILHMFQCQSGSANLKLIGGPGSAGILVMNNNITACKQISVINQSPTGIYEKEIDLIKL

SEQ ID NO: 142 - protein, 1035 aa, Candidatus Puniceispirillum
MRRLGLDLGTNSIGWCLLDLGDDGEPVSIFRTGARIFSDGRDPKSLGSLKATRREARLTRRRRDRFIQRQKNLINALVKYGLMPADEIQRQALAYKDPYPIRKKALDEAIDPYEMGRAIFHINQRRGFKSNRKSADNEAGVVKQSIADLEMKLGEAGARTIGEFLADRQATNDTVRARRLSGTNALYEFYPDRYMLEQEFDTLWAKQAAFNPSLYIEAARERLKEIVFFQRKLKPQEVGRCIFLSDEDRISKALPSFQRFRIYQELSNLAWIDHDGVAHRITASLALRDHLFDELEHKKKLTFKAMRAILRKQGVVDYPVGFNLESDNRDHLIGNLTSCIMRDAKKMIGSAWDRLDEEEQDSFILMLQDDQKGDDEVRSILTQQYGLSDDVAEDCLDVRLPDGHGSLSKKAIDRILPVLRDQGLIYYDAVKEAGLGEANLYDPYAALSDKLDYYGKALAGHVMGASGKFEDSDEKRYGTISNPTVHIALNQVRAVVNELIRLHGKPDEVVIEIGRDLPMGADGKRELERFQKEGRAKNERARDELKKLGHIDSRESRQKFQLWEQLAKEPVDRCCPFTGKMMSISDLFSDKVEIEHLLPFSLTLDDSMANKTVCFRQANRDKGNRAPFDAFGNSPAGYDWQEILGRSQNLPYAKRWRFLPDAMKRFEADGGFLERQLNDTRYISRYTTEYISTIIPKNKIWVVTGRLTSLLRGFWGLNSILRGHNTDDGTPAKKSRDDHRHHAIDAIVVGMTSRGLLQKVSKAARRSEDLDLTRLFEGRIDPWDGFRDEVKKHIDAIIVSHRPRKKSQGALHNDTAYGIVEHAENGASTVVHRVPITSLGKQSDIEKVRDPLIKSALLNETAGLSGKSFENAVQKWCADNSIKSLRIVETVSIIPITDKEGVAYKGYKGDGNAYMDIYQDPTSSKWKGEIVSRFDANQKGFIPSWQSQFPTARLIMRLRINDLLKLQDGEIEEIYRVQRLSGSKILMAPHTEANVDARDRDKNDTFKLTSKSPGKLQSASARKVHISPTGLIREG

SEQ ID NO: 143 - protein, 1270 aa, Mycoplasma gallisepticum
MNNSIKSKPEVTIGLDLGVGSVGWAIVDNETNIIHHLGSRLFSQAKTAEDRRSFRGVRRLIRRRKYKLKRFVNLIWKYNSYFGFKNKEDILNNYQEQQKLHNTVLNLKLEALNAKIDPKALSWILHDYLKNRGHFYEDNRDFNVYPTEELANYFDEFGYYKGIIDSKNDDDDKLEEGLTKYKFSNQHWLEEVKKVLSNQTGLPEKFKEEYESLFSYVRNYSEGPGSINSVSPYGIYHLDEKEGKVVQKYNNIWDKTIGKCSIFPDEYRAPKNSPIAMIFNEINELSTIRSYSIYLTGWFINQEFKKAYLNKLLDLLIKTNSEKPIDARQFKKLREETIAESIGKETLKDVESEEKLEKDDHKWKLKGLKLNTNGKIQYNDLSSLAKFVHKLKQHLKLDFLLEDQYTPLDKINFLQSLYVYLGKHLRYSNRVDSANLKEFSDSSRLFERVLQEQKDGLFKLFEQTDKDDEKILTQTHSLSTKAMLLAITRMTNLDNDEDNQKNNDKGWNFEAIKNFDQKFIDITKTNNNLSLKQDKRYLDDQFINDAILSPGVKRILREATKVFNAILKQFSEEYDVTKVVIELARELSEEKELENTKNYKKLIKKNGDKISEGLKALGIAEDKIEEILKSPTKSYKVLLWLQQDHIDPYSQKEIAFDDILTKTEKTEIDHIIPYSISFDDSSSNKLLVLAESNQAKSNQTPYEFINSGKAEITWEVYEAYCHKFKNGDSSLLDSTQRSKKFAKMMKTDTSSKYDIGFLARNLNDTRYATIVFRDALKDYANNHLVEDKPMFKVVCINGGVTSFLRKNFDPKSWYAKKDRDKNIHHAVDASIISIFSNETKTLFNQLTKFADYKLFKNTDGSWKKIDPKTGVVSEVTDENWKQIRVRNQVSEIAKVIDKYIQDSNIERKARYSRKIENKTNISLFNDTVYSAKKVGYEDQIKRKNLKTLDIHESAEENKNSKVKKQFVYRKLVNVSLLNNDKLADLFAEKEDILMYRANPWVINLAEQIFNEYTENKKIKSQNVFEKYMLDLTKEFPEKFSEAFVKSMIRNKTAIIYNVEKDVVHRIKRLKILSSELKENKWSNVIIRSKNESGTKLSYQDTINSIALMIMRSIDPTAKKQYIRVPLNTLNLHLGDQDFDLHNIDAYLKKPKFVKYLKANEIGDEYKPWRVLTSGTLLIHKKDKKLMYISSFQNLNDLIEIKNLIETEYKENVDSDPKKKKKASQILRSLSVILNDYILLDAKYNFDILGLSKNKIDEILNSKLDLDKIAK

SEQ ID NO: 144 - protein, 1204 aa, Prevotella ruminicola
MERILGIDTGTNSLGWAIVDKDENQYHLVAKGTNIFSEGVKIEKGIESSKAAERTEHRSVRKHYWRRKIRKIRLLTILSDNDLCPRLKHEQLRQWRLKKVYPTDDTFMEWQRTEDKAQVNPYKFRYICLTQKLDLSDITQRFILGRALYHLNQRRGFLSNRKEATKESEGTVKEGISSLSKDMKDSGCEYLGEYFYQLYQQGKKIRNHYTARKEHYLKEFKAICSKQELDDALIEKLEKAIFDQRPLKSQKGQVGTCTFEKGKSRCPSSHPLYEDFRMYSFINNIKVQVDTLYDKGERSLTDEEKQLIIPLFKRKSKRTFPFEDIAKKIAGKNNYCYIKSNEEKAYKFNYQMDTQVSGSPVNAQLEEIFGEDWLSSVCEVYTLANNKSRFQIMNDVWHVLFFYDDEDKLKEFAKDRLQLDDELAEKFSKISIPNDYAALSLKAIRKIMPYLRDYGLIYSEAVFLANLVDVLPQHVWGIKEMREAAIENVIDVMHSYDKNNIDGITLEGCVKTFLKERYQVSDDNLKKLYHPSMLDPYPRQRPNDEGVFQLGSPRISSVKNPMAMHSLFRLRKVVNLMLKKGYITPDTKVHIEFSRDLNDANKRWAIQTWQRENEKERERCRKEIEKYIASPSDTDILKYQLWEEQNHKCLYTGDEIRITDFLGDNPKYDIEHTIPRSAGGDSTKMNLTLCSSRFNRDEKKTKLPAELVNHDEILERISNWKEKYEDIDKQIRKISTKGATSKEDKDSKIRRRHYLILQRDYWRGKYQRFTMTEVPEGFSRRQGTDISVISRYARMYLKSVFKQVYIVKGIATSDFRKMWGIQDEYAKKERVNHVHHCIDAITIACIGKAEYDKLADYRHQYDDYLFQGKTKPTFDKPWPSFVIDIKHIQDELLIAHYAKDNLEKFTKKNLRGKDGRIIRDKFGNKLQMKGDTSRNSLHNDKFYGAINHEGEIKYVYRTNIEALDAKSIGNIVDPTVRSIIESAIAIHGSLKAAINKGIWMNEEKHIPIKKVRVFRNDVKKPIELKDQRDLSDKDYKQHYYVTNDGNYMMLIFSKLNNKGREIRQHVVINSLEATEVIKSHKRSQVGKVVWESYYSKEGFDLIYKLKSGTMILLYENNRDEVWDLDIRNLQKRLYIITKMKYDGRIYMMHHQEAREKKDLEEKSGSFKINEDYRPLIVNSYNQFNALVQDLDFEINDLGEIRRLI

SEQ ID NO: 145 - protein, 1178 aa, Scardovia inopinata
MGKRHNSNMAKKKISYRIGIDVGLNSTGLAAIEVDDDGAPIRILNTMSVIHDGGVDPDAAKVRGTRLAISGIARRTRRMRRRRAKRLDRLEQILEKYGYTDTEPVLEEPYGPWICRAELADGFINDDEQRRMMIGIAIRHIARHRGWRNPYQNVRALLNIDDSDLSEEYKNLKEKVQDQINDGKDLPNFTPSQLVRDYLDNFSGQPAARIRTGKAGPRGNRRDAVGILPQRMRQSDYAYELQRIFDMQKIGRDEAQELLMAVFEAKSPKGSAEKRIGKDPLTGKKRALKASLAFQKYRIVATITNLRIKTGTGSERMLSPTELNDIYTYLLRVQDDNHLPTWEDICEEVLHIGRYQLAGIGKTFEGGERISNMPPVIQTSLAIHGLSEGTLAEKLTKWWDKADDDSRESMIKLLSNTVDIDRVNEVDENFASALDFIDSLDDEELTKLDKIALPRGRAAYSEEALNKLTADMLNTGDDLFSARQRIYHVNNSWRPPQPPIGEPLGNPAVDRVLKITNRYLMNCLNRWGQPRRVTIEHTRSGFTSVKQATEHQKISDKRAEYRRDIVKQLEEAGVESVHEYDIRRWEAVQRQNGQCLYCGRDITFKTCEMDHIVPRKGPGSTNTRTNFAAVCPECNRMKSNIPFASWAETKEAKDRGVSLDKAIKQVRFFNFTKNEYSPQAQRNFKKSMIERLKQKTSDEPLDNRSIESVSWMADELYKRIDWYFNHEQYETSKKAINDDKDNLSGTQVVVYPGSITAEARNAAGLGGNIHFIGGRYKTRLDRRHHAVDACVIAMMEPGIARILTERNQLRQAQRLTARIEDDEVNWKDYPTENTAGYNKYQAWSDRMHALLEYMNNALDYDKIPVVRWERLQLGNRSAHEDTIHPLKKLPLSHEISAIDINHASTPALYEALVSLPDFSEQDGLPADPSRQINVNGERYSGDDLVSFFNSNAAQIAIQGGSAELGTAFHHARIYRCWTVGKNGKKKIFFGMIRVYQHDLLHAKNEDLFTYPLKRSSVSMRYAKKEVVHAILSGNAEYVGYLCVGDELVLDLKGDKSNDEGGSRLSGQVGEFVQKFEEDSKVNSQIVNRWTVDGFPDEAKLRLRPSMFAGEGLKNMKSELVENAAIKNILSKTGWRVSVDVISKKSPVVLRRNAFGEPRWKTNAGLPVSYRWQDTETKE

SEQ ID NO: 146 - protein, 1371 aa, Gordonibacter pamelaeae
MNLRNVESYQVGLDIGTGSVGWAVLDDNGDLCRFKGKPTWGSRVFPTAETAAEARVHRGQRRRYDRRRQRIDLLQRFFADEVAKVDPEFFIRLNQARLHPENRDPAHADYRWPLFNGSNFTEKDYYRQFPTIYHLRAHLLKSDEPADIRLVYLALHNIVKHRGNFLHQDNPSLSARNANVGDAVEALCLALDEWCGAHDVECACDEAALAEALGDASLRPGEKRERAEAALGVEKAHKKLAKAVSSAVVGYAAEFGHVFFAESEGSKFALSNDEKVEAYVCPDEGRDLFDAMRAVHSSYVLMGILSEAQGELLSVCKVGEYERYKRDLETLKSLVRAYGPERYDEFFCGPFYEGTRDYDPGKAQGYTKYNLGASKLSHEDFLKEVQKLLKDIGAQADERYADIERAIEAGAFLRRLKTSDNGTIPYQLHLEEMDAIIERQAAFYPFLAQEKDKLKSLVSFRIPYYVGPLTQKNAARDGKGEARFAWSSRKPGMEDARVYPWNWEDVIDKDQSAEDFIRRMTGTCTYLKGEPVLARCSLDYELFCVLNELAGARWTQDGDKSYRFDAADRLGIVEDLFKKRKRVTYEAAEKWLARTHGPESGKSAGGAYHVSGGQGEDAFESQLSSHYDFCKILGVDELSDADEAMAEDIILWNTVFEDRSILKRKIKLAYGDRLGDAQVRKLCQKRYTGWGRLSGELLRGLRSATDNGPKTIMDILLEGDPNHARRMGAAMNLMEILHDDLLEFQAKIDEHNRERALAVGGMSVDEVTGSPALRRGINQALRVVDEIAGIAGKPPAHIYVEVTRDEGARNKGRRTTSRYRALEAALSSIKAQCADVYAELKERDPRALDDERLTLYFMQCGKCMYSGDALDINKLQTYQVDHILPQSYVKDDSFENKVLVRPDTNQRKGDTLLLDERLIARMRGFWRTLRDAELIGEKKFNNLTRTSVSDEQMKKFVSRQLVETGQMVKQVQQLLQARYPESEVQPVKAGVSHQLRVGCALAKSREINDFHHAHDAYLACQVGRFVQYRHSAVYSEPVKMAAVVKQFIKKQAEDYRRTRELPGSDGFIVSSFMTPGFDVKTGEVFRDAWDAGAEIDRIRRCFDYKDCFISRMPEETHGAFWDATIYSPRAAGKTLSLPLKRGLDPRKYGSYSREQFAYFFVYEAVKPKKKQRVLEFAPVPVRVASALANDPDALEDYARELAEAEGLVFERIRRRKVYKYQQIIVGDSRLYVTGREEVRNARQLAFSQDETKLICRIEQGEECEEGELLDLFRSMQRKYLACAPRLARLMKVAEMEEGFIAATASGKREVLLSLTSIAAAHRNSIDLKPIGRKGSSGQMKITFSKELSTNGILFVDSSVTGMFERRCRLGL

SEQ ID NO: 147 - protein, 1388 aa, Zunongwangia profunda
MKRILGLDLGTNSIGWALVNEAENEKEISKIIKLGVRVNPLTIDEKTNFEKGRPLSTNADRTLKRGARRNLQRYKLRRENLIEILIDNHIITKETPLTEIGKGTTYQTLSLRAKAVRERIDLEDFAKVLLAINKKRGYKSSRKASNDEEGQAIDGMAIAKELYERGITPGQYVLELLENDRKYIPDFYRSDLKQEFNKIWNNQKTFYPEILTDELFKELDGKNKSQTWAICQKPFNIKGIKRITKGREKTIENYHWRVKGLSGKLNLEKLAIILQEINNDINQSSGYLGGISDKSKKLYLNKETVGEFLYKQIAKNPHTSLKNQVFYRHDYLDEFEQIWKTQSNFNANLTDELKQEIRDVIIFYQRKIKSQKSLISFCQFESWEQEYFDKETGKTKTRTVGRRVIPKSSPLFQEFKIWQNLNHLVFTNSETDEKIEIKEVEQEIRKELFEELNLRGDLNPNDLLKILRSQFKIGKLSNWKCNFEKIEGNRTNAALFNIYQKISDFEGYGIDWNKSNAKKIRKELKATFPEIGIDASILEFDAYKKQLTNQSSYELWHLLYSAEEDFKISEQDKLIYGNSSVSLKKKLHLKFGFNPEYAKMLANLSLMSDYGNLSAKAIKKILPYLEDGHLYSEACRLAGYNHSKSLTAEELEKFEPKAKLDLLKKNSLRNPVVEKILNQMVNVVNQVIDTYGKPDGVRIELARELKKSAKERAEMTKGIADGTRRNEEIKKIITQKFGIPNPTKSDLVRYRLWQELESRGYKDIFTDKYISPDKIFSSEIDIEHIIPKALLFDDSFSNKTLSFRNVNLKKANRTALDFITQDYQSNVEAYKERVETWNKDNHISKGKRNKLLMSLKDIPDGFIERDLRNSQYIARKAKRMLYEVFPNEVLATSGSITDKLRSDWDLINVMKELNLPKYKALGLTEYEERLDKGTEELFKHEVIKDWTKRNDHRHHAMDALAVAFTTHNHIQYINNLNARKDITQDNHPIIKNIENLITEVNSKGKRVFKAPMSSFRESAKEQIEAILVSFKNKNKVVTKNINQTKKEGGFNYQNAKTPRGQLHKETIYGKSKQPLEKPVKINNRFCKKQVGLIINFKEQEAVLHHLKKYDNNEKIAFSNKTLKSDPIQVNGSPLREVKIFEEIFTIRKDINPDNFKTQKHLDKIIDKGIKEVMKKRLEEYNGDFKTAFSDLDKNPIWLNQSKGITIKRATISGVTNAEPLHQAKDHLGNIILDDNGKEIPIDYVSTGNNHHVAIYQDESGNLQEEVVSFYEAVIRKNQDQPIIKKRHPKGWKFLFTMKQNEMFVFSSENFNPSEIDLLDEKNAAIISPNLFRVQKIATKNYMFRHHLETEVTNNLDFTYRHFQATEWLRNLCKVRIDHIGRIVQIGEY

SEQ ID NO: 148 - protein, 1082 aa, Methylosinus trichosporium
MRVLGLDAGIASLGWALIEIEESNRGELSQGTIIGAGTWMFDAPEEKTQAGAKLKSEQRRTFRGQRRVVRRRRQRMNEVRRILHSHGLLPSSDRDALKQPGLDPWRIRAEALDRLLGPVELAVALGHIARHRGFKSNSKGAKTNDPADDTSKMKRAVNETREKLARFGSAAKMLVEDESFVLRQTPTKNGASEIVRRFRNREGDYSRSLLRDDLAAEMRALFTAQARFQSAIATADLQTAFTKAAFFQRPLQDSEKLVGPCPFEVDEKRAPKRGYSFELFRFLSRLNHVTLRDGKQERTLTRDELALAAADFGAAAKVSFTALRKKLKLPETTVFVGVKADEESKLDVVARSGKAAEGTARLRSVIVDALGELAWGALLCSPEKLDKIAEVISFRSDIGRISEGLAQAGCNAPLVDALTAAASDGRFDPFTGAGHISSKAARNILSGLRQGMTYDKACCAADYDHTASRERGAFDVGGHGREALKRILQEERISRELVGSPTARKALIESIKQVKAIVERYGVPDRIHVELARDVGKSIEEREEITRGIEKRNRQKDKLRGLFEKEVGRPPQDGARGKEELLRFELWSEQMGRCLYTDDYISPSQLVATDDAVQVDHILPWSRFADDSYANKTLCMAKANQDKKGRTPYEWFKAEKTDTEWDAFIVRVEALADMKGFKKRNYKLRNAEEAAAKFRNRNLNDTRWACRLLAEALKQLYPKGEKDKDGKERRRVFSRPGALTDRLRRAWGLQWMKKSTKGDRIPDDRHHALDAIVIAATTESLLQRATREVQEIEDKGLHYDLVKNVTPPWPGFREQAVEAVEKVFVARAERRRARGKAHDATIRHIAVREGEQRVYERRKVAELKLADLDRVKDAERNARLIEKLRNWIEAGSPKDDPPLSPKGDPIFKVRLVTKSKVNIALDTGNPKRPGTVDRGEMARVDVFRKASKKGKYEYYLVPIYPHDIATMKTPPIRAVQAYKPEDEWPEMDSSYEFCWSLVPMTYLQVISSKGEIFEGYYRGMNRSVGAIQLSAHSNSSDVVQGIGARTLTEFKKFNVDRFGRKHEVERELRTWRGETWRGKAYI

SEQ ID NO: 149 - protein, 1186 aa, Gardnerella vaginalis
MEGNISYAIGIDVGLNSVGLAAIRLDNNGEPIRILKAMSVIHDAGIDPNGAKESDTRKAISGVARRVRRLYRQRRRRLQKLDFLLHSLGFPVVENKDLDFSDSFTPWIFRAKLADEYIADEKQRKQMLSVAIRHIARHRGWRNPYQSIKSMTQETEYSEFYNELLKNIEKFAPGVSCEGSTPAQLVRDYLLSQQGKASRRLRITTDDRRKNHPNSLDPVLPRKLMQSDNMLEILNIFNVQHIDNKYVREQIINAVFYAKSPRGSAENRVGKDAITGKGKRALKASLAFQKYRIISTISNLRIRENSKERCLTIEEKQSVYKLLTTSTDEYSKEKSAEAPLYTWIDVADCLGIERYKLRGVGSQIEDGESVGNRPPMLNSELAILYANAKSLKQSLITWWLAANRTQEDKEAFIEILSNTVDIEAIHDNPEYQDKYGSVIAFIDSMDETEIAALENISLPNGRAAYSLETLDKLNKQMLETDDDLFEARKKLFNLPNNWRPSEAPIAEPTGNPSVDRVLKIVHRFLISAKNRWGNPERINIEHVRSGFQSKKMANSYKKLLDKRTEGKENLKAMMRNSLHLGTSDSISDADIRRYEAVQRQNGQCLYCGSEITYHTCELDHIVPRKGPGSTNTRENLVATCSSCNAQKCNTPFATWCEESTYCKNHDISVDSAINRVRAFIFPPNSYDKRGASQFKKEVIARLKQKVGDEAFDNRSIESVAWMANELHRRIDWYYNSQNYQTNNGISDITNKAQTNVGVYAGSLTAIARRMSGIDGKLEFFDGRRKTRFDRRHHAVDASVIAMMTPGIAQILAIKCNLRETQLLQGNKVVPGGIDWKEYPTANDQGYQQYANWSVRMNALLELLNEEMRADRIAVVNSIRLRYSNSSVHKDDVHALLKLHVGDEIDSETIRRASTPALYCALTRNPDYDVNNGLPENTDRTILLHDKKLNADDSITFFKSKAAQLFVREGSVEIGNSIHHLRIYEYFEKLKSGKVKKSYGMIRVFQDDLHRYIHEDLFSCDLPEQSISMRYADTKVAHAVQTGNANYLGYLVPGDEIIVDFSHVKLSGYIGEFVEFLNKIGANCAAYKHWVVAGTDDKTTLILKPSMISSEGIDKLYSNCERNNFDYASYEKSIDKILVDKGWRVSVNVLDQYKAATIRRNALGEPRWASRSHLPISWSWDTGENRE

SEQ ID NO: 150 - protein, 1434 aa, Bacteroidetes oral
MKNILGLDLGTNSIGWAYVKQAQNDSEKSEIAELGVRVNPLTVDEKTNFEKGKPISTNADRTLKRGARRNLQRYKLRRQELIELLKDYQVISDKTILAEDGKETTFETLRLRVKSAKEQVSLEELARILLMINKKRGYKSSRKAKNEDEGQLIDGMEIARRLYDENLTTGQLSLQLLKEGKKSLPDYYRSDLQHELDKVWNFQKQFHPDILTDEFYTSIQGKGQKATRESFSSKYGIDTAENKGSREEKKLQAYQWRADATHKELTKEELAFVITEINNNINNSSGYLGAISDRSKELIFANETVGEYLWKQIQNDPHTSLKNQVFYRQDYFDEFERIWETQSGFYPQILTESLKNELRDILIFYQRKLKSQKALVSICEFESKEIPLKDKQGNPISKNGIPVTKLVGPKVAPKSSPLFQEFKIWQNLNNVLVRPKGSRKRKVTTNQQSTLLEGQEPVFELNLEQKELLFEELNLKGNLKTDYCLELIGYSAKEWEMNYPTLEGNKTNKALYEAYLKIIDSEGYDAKKLLKVKTDKDDINLDDIKVSASEIKTMISDIFNELGINTKILDFDAELERKQFEAQASYRLWHLLYSYEGDDSKSGNELLYRLLEDKFGFKREHSKTLANVSLLSDYGNLSTKAIRTIYPYIKENKFSTACELAGYRHSKLSISKEENENRTLKDTLDVLKKNSLRQPVVEKILNQMINLINELIEKHSEKDEKGNIVKYFKFDEIHIELARELKKNAEERRELDSKVREGKDRNEKIITILKSEFGLPYPTKNDITRYRLYEELKDNGYKDLYTNTYIPREKLFSKEIDIEHIIPKSRLFNDSFSNKTICYRQDNLNKGERTAYDYIEGLGKTQLDEYLNRVENLYTNKFITKAKYRNLLKKESEIGDGFIERDLRETQYIAKKAKEMLLQITRHVVSTTGSITDRLRDDWELVNVMRELNLPKYKVLGLTEIQERKNGQTVEVITDWTKRNDHRHHAMDALTVAFTKHSHIQYLNFLNARKDEKHKEYSNIMGIQQLETEKTTDKDGKDRRVFKTPIPNFRQVAKEHLESILISHKTKNKVVTRATNKIAGSKKQQETLSPRGQLHKETVYGKYRRYVQKEEKIGSKFDLQTIERVANPLYKRLLTKRLEENGGDPKKAFTGKNALAKSPIYLDETQTQQLPEKVKLVWLETDFSIRKDITPDNFKDEKSIDKVLDEGIKRILKDRLKSFDGDAKRAFTDLEQNPIWLNKEKGIAIKRVTISGVSNAEPLHTKKDHLGNEIFDDTGKPIPVDYVSTGNNHHIAIYRDENGNLQEKAVSFFEAVTRANQGLPTVDKTYNQHLGWQFLFTMKQNEMFVFPNKETGFDPQEIDLLDPKNKKLISPNLFRVQKISTKNYFFRHHLETSVETHNALNGVTYKSQLGLNGITDIIKVRINHLGDIVHIGEY

SEQ ID NO: 151 - protein, 1341 aa, Unknown
  Peptoniphilus sp. oral taxon 386 str. F0131
MWGSRLFEEASTAQDRREHRSNRRRLERRKYRLDLLEELFVEEINKIDPEFFIRLRESKFHFEDRSLKNTFILFNDKMEGGYNDKVFFSKYPTIYHLRSALINGNKEDVRAVFLAIHNILKNRGHFLLAGNDINISLSLNDTLTDLFEYLKIHLGIEVEFENKLKDIEKIALDKNLSKSDKQKKIVQLLETDYKKQLADVFKLSLGLTANMENIFGKENEQGLEFINAENKIKKIQFDSSYEENIAEFDQFYGEYFEIIDICKKIYDAISLSQILVDGKGLSESKVLSYEKHKEDLKLLKKVLKNIDKAYDNKGEDRLVYKVLKEDKDKGTNYVNYSKLSNNGTATTKEEFYKFLSKNLDLKKFGKLNKEDIETLDYINSEILLGRFLPLQKEKINGVIPYQLQMKELTQILNNASKYLPFLNKIEDGMTVKDKIISLIKFRIPYYVGPLNEYNRIENGNGFAWIEKKKNEKIFPWNFNDVVDIEKSAEKFINNLTNKCTYIKEETVLPKNSIIYSKFMVLNELNNLQYGNKKLDIELKMKMYTDLFLEKKDNRKVTEKRILEYFRINGINDGKEKLTGLNNEIHADMKSYRDMCEIMGENFNINVAENIINWITVFHGEKKILINKIKNVYGKMFNDEQISKLSKLNYSDWGRLSKKLLTDIKCYIDADGINFPVSILEAMEVSNKNLMELLSNKYEFISCIDDINNKYFGDRDISASELIDELYVSPAVKRGIWQSVRILEEIVSIIGHNPKKIFIEMTRHNEEKVQKSSRRHNLEELYKAIRKDPEYVELIKEFDSTTDTDSFKIKKLYLYFMQLGKCAYSKEKIDFDKLFTDSYDIDHIYPRSKTKDDSIHNNLVLVKAKYNREKTDVYPIDINIQKNMNSFWNFLYTKKFITEEKYKRLIRTSDLTDEELAKFISRQLVETSQSTKATAEVLKQIYGDSDICYVKAENVSDFRYGSSRQKDKNDIQKLFVKCREVNHFHHAKDAYLNIVVGNVYDVKFTKNPVNFIKKNKMGNKSNYSLNHMFCFDVERNGYKAWDSSETIKTVGRMMKSNDVRITKHVHPTRGELYDATIYKAKIAKTGSYMPLKSSKNTPLSDVTKYGGYTKIKIAYYSVYKYKFSDKNLIKTEIRLIPIPIYLSKNDDDIKEYVKNYLNDRVNSKLIDFTKIYDKLYVNSLIKINGYLYYLGGKTNDRVWIDNAVSIVLDDKIEYLIKRISNDIKYGYEINVSDDELMDIYESLAEKANKKIFYNRLSDFEKIFSNMDVKKKFVKLEKNDKCRVLLQLLNVLTDSQTTYKLEMVGLKHSRSNIGMKISNLEEFKVINSSITGLYSNEIDILNI

SEQ ID NO: 152 - protein, 1391 aa, Lactobacillus gasseri
MTKIKNEYIVGLDVGTNSCGWVAMDFQNTILRMHGKTAIGSHLFDAGNSAADRRAFRTTRRRIKRRKWRLKLLEEIFDPYMTEVDPYFFARLKESGLSPLDKRKNVSSIVFPTALEDKKFYCNYPTIYHLRYDLMSEDKKFDLREIYLAIHHIVKYRGNFLYNTPVKDFEASKIDVKDSLEKLNELYERLDSEFTVELDSSNALEIEKIIRDKKVFKINKVKSIHQLLSLKTENKERTKLIKDVSKQIINAILGYKTKFETILLKNISKDEADDWEFKLTDVDADNKFENLIGDLNENEQEILLEIRNLANAITLSNIVEEGKTLSESMIDKYNKHSDDLELLKQVISDHPDRDKAKKLALAYDLYVNNRHGKLLQAKDVLGSKKTLSKEDFYKEVKKNLDDSKASQEILDTIALDSFMPKQRTNENGVIPYQLHQLELDRIIKNQGKYYPFLKEVNPVSSHLKEAPYKLDELIRFRVPYYVGPLISPNESTKNKQTKKNQNFAWMIRKEQGQITPWNFDQKVDRMASANKFIKRMTTKDTYLLGEDVLPANSLLYQKFTVLNELNNIKINGKRISVPLKEELYNNLFKKNSTVTTNKLKSYLKENYNLINVEIKGLADEKKFNSGLTTYNKLRNLKIFDQQLDDLNYDKDFERIIEWSTIFEDKAIYKDKLKTIKWLSDRQIDKLSKIRMQGWGQLSKKLLSQLTDNNGQTIIEQLWDSQNNFMQIVNQSDFKDAIAVANQNLLVNTSVEDILNEAYTSPANKKAIRQVVKVVDDIVKAASGKVPKQIAIEFTRDADDKAKISQTRANKLRKVYKELSNELASETIRNELERVAKDQKLLKDKYYLYFMQLGRDAYTGEPINIDDLGQYDIDHILPQSFIKDDSLENRVLVKKAVNNGKSDNVPVKLYGNRMAADLGMTIRHMWEKWKDQGLITKTKYNNLIIDPDKINKYESSGFIHRQLVETSQIIKLVSTILQSKYPDTEIIVVKARYNHYLRKHLNLYKSREVNDYHHAIDAYLSAICGNLLYQVYPYLRPFFVYGQYKKFSSDPKKEKIIYDKTRKYNFISQIFENKSNDIISLETKKKVFDKKDIIEKLKHAYNYKYMLVSRETETHDQEMFKMTVYPRLSRDTKKSRNLISKKKDMPTEIYGGYTNNSDAYMVIARINKKKGTEYRVFGVPMRELVNLRKAEKNGRYNAYLKQVLEPEIMYSKNGKKNKTISSFEIVKAKVPYKQVILDGDKKFMLASSTYVQNAKQLTLSQNSMQAITDNCENDTEEEKALEEKALIEAYDEILTNIDKYLPLFDINKFREKLHAGREKFINLSLDVKKDTILQVLNGLHDNAVMPKIKSLGLSTPLGFMQFSSGVPLSENAKLIYQSPTGLFEKRVKISDL

SEQ ID NO: 153 - protein, 1426 aa, Sphingobacterium spiritivorum
MKHILGLDLGTNSIGWALIKQDFENKQGEILGMGSRIIPMSQDILGDFGKGNSVSQTAERTKYRSVRRLRERFLLRRERLHRILNVLGFLPEHYASQIDFTKRFGKFKEETEPKLVYSNEGFIFKKSFEEMLSDFKTHQPQLLEDNKKIPYDWTIYYLRKKALSRKIEKEELAWILLNFNQKRGYYQLRGEEEEENPNKLIEFYSLKIVDVLADEPQKGKSDIWYSLILENGWIYRRSSKTPLFDWKEKTRDFIVTIDLNDDGSVKTDKEGNEKRSFRAPGENDWTLVKKKTEQEIDSSRKTVGTYIYETLLKNPKQKIKGKLVRTIERKFYKTELKQILEKQKEFHPELRQDDLYSDCVRELYKNNEAHQLTLSKKDFVHLFMEDIIFYQRPLGSQKSSISNCTLEFRKYKDENGTEHTQYLKAIPKSNPYYQEFRIWQWMYNLNIYKKEDDTNVTKDFLNTKADFESLFEFLNNRKEVDQKALLKHFKLNDKTHRWNYVEDKKYPCNETKTMILSRLDKVENISDDFLTREMEQKIWHIIYSVNDKVEYEKALKSFAGKNNLEDNSFFEAFKKFPPFKSEYGAFSEKAIKKLLPLMRMGKFWNYNNISEQSKSRIQKIITGEYDENIKDKVREKAIHLTTETDFQGLQLWLVQYIVYGRHSEAAMLGKWNSADDLEEFLKEFKQHSLRNPIVEQVITETLRVVKDIWQKYGNGAKDFFREIHIELGREMKLPAEERERLTRQISENENTNFRIKALLAEMMDDNSVENVRPFSPMQQEILKIYEEGVLNSDIEIEDDILKISKTAQPSSSDLKRYKLWLEQKYKSPYTGQIIPLNKLFTPEYEIEHIIPQSRYFDDSFTNKIICESAVNKLKDNYIGLEFIKKLGGSIVECGNGKSVAILKHDAYEDFIKKHYANNRSKRNKLLLEDIPEKMIERQMNDTRYISKYISGVLSNIVRVEDGTDEGVNSKNIVPGNGKITTQLKQDWGLNDVWNDLILPRFERMNHLTNSTDFTAWNENHQKFLPTVPVEFSKGFSKKRIDHRHHALDALVIACATKDHVNLLNNQSAKSDTKRYDLKKKLMKFEKVAYNHPQTGERIEREAPKQFLKPWETFTIDAKNHLETIIVSFKQNLRVINKATNYYEKYVEKEGTKVKERVEQKGTNWAIRKPMHKETVSGKIDLPRIKVPKGKILTATRKSLDTSFNLKTIGSITDTGIQKILKNYLQYKDNNPELAFSPEGIEDMNKNIEKFNNGKAHQSISKVRVFELGSKFPLGQSGNKKEKYVEAAKGTNLFFAIYQDKNGKRSYETIPLNEVIERQKQGLSVVDLKGVDDFYLSPNDLVYVPSEDELENISMIDFNKMSSERIYKVVSFTGNQIFFVRQDIATSVVNKAEFSTLNKMERAIDGTMIKETCVKLQIDRLGNISKI

SEQ ID NO: 154 - protein, 1361 aa, Lactobacillus casei; identical to SEQ ID NO: 70

SEQ ID NO: 155 - protein, 1436 aa, Bacteroides fragilis
MKRILGLDLGTNSIGWALVNEAENKDERSSIVKLGVRVNPLTVDELTNFEKGKSITTNADRTLKRGMRRNLQRYKLRRETLTEVLKEHKLITEDTILSENGNRTTFETYRLRAKAVTEEISLEEFARVLLMINKKRGYKSSRKAKGVEEGTLIDGMDIARELYNNNLTPGELCLQLLDAGKKFLPDFYRSDLQNELDRIWEKQKEYYPEILTDVLKEELRGKKRDAVWAICAKYFVWKENYTEWNKEKGKTEQQEREHKLEGIYSKRKRDEAKRENLQWRVNGLKEKLSLEQLVIVFQEMNTQINNSSGYLGAISDRSKELYFNKQTVGQYQMEMLDKNPNASLRNMVFYRQDYLDEFNMLWEKQAVYHKELTEELKKEIRDIIIFYQRRLKSQKGLIGFCEFESRQIEVDIDGKKKIKTVGNRVISRSSPLFQEFKIWQILNNIEVTVVGKKRKRRKLKENYSALFEELNDAEQLELNGSRRLCQEEKELLAQELFIRDKMTKSEVLKLLFDNPQELDLNFKTIDGNKTGYALFQAYSKMIEMSGHEPVDFKKPVEKVVEYIKAVFDLLNWNTDILGFNSNEELDNQSYYKLWHLLYSFEGDNTPTGNGRLIQKMTELYGFEKEYATILANVSFQDDYGSLSAKAIHKILPHLKEGNRYDVACVYAGYRHSESSLTREEIANKVLKDRLMLLPKNSLHNPVVEKILNQMVNVINVIIDIYGKPDEIRVELARELKKNAKEREELTKSIAQTTKAHEEYKTLLQTEFGLTNVSRTDILRYKLYKELESCGYKTLYSNTYISREKLFSKEFDIEHIIPQARLFDDSFSNKTLEARSVNIEKGNKTAYDFVKEKFGESGADNSLEHYLNNIEDLFKSGKISKTKYNKLKMAEQDIPDGFIERDLRNTQYIAKKALSMLNEISHRVVATSGSVTDKLREDWQLIDVMKELNWEKYKALGLVEYFEDRDGRQIGRIKDWTKRNDHRHHAMDALTVAFTKDVFIQYFNNKNASLDPNANEHAIKNKYFQNGRAIAPMPLREFRAEAKKHLENTLISIKAKNKVITGNINKTRKKGGVNKNMQQTPRGQLHLETIYGSGKQYLTKEEKVNASFDMRKIGTVSKLAYRDALLKRLYENDNDPKKAFAGKNSLDKQPIWLDKEQMRKVPEKVKIVTLEAIYTIRKEISPDLKVDKVIDVGVRKILIDRLNEYGNDAKKAFSNLDENPIWLNKEKGISIKRVTISGISNAQSLHVKKDKDGKPILDENGRNIPVDFVNTGNNHHVAVYYRPVIDKRGQLVVDEAGNPKYELEEVVVSFFEAVTRANLGQPIIDKDYKTTEGWQFLFSMKQNEYFVFPNEKTGFNPKEIDLLDVENYGLISPNLFRVQKFSLKNYVFRHHLETTIKDTSSILRGITWIDFRSSKGLDTIVKVRVNHIGQIVSVGEY

SEQ ID NO: 156 - protein, 1517 aa, Unknown
  Bacteroides sp. 20 3
MKKIVGLDLGTNSIGWALINAYINKEHLYGIEACGSRIIPMDAAILGNFDKGNSISQTADRTSYRGIRRLRERHLLRRERLHRILDLLGFLPKHYSDSLNRYGKFLNDIECKLPWVKDETGSYKFIFQESFKEMLANFTEHHPILIANNKKVPYDWTIYYLRKKALTQKISKEELAWILLNFNQKRGYYQLRGEEEETPNKLVEYYSLKVEKVEDSGERKGKDTWYNVHLENGMIYRRTSNIPLDWEGKTKEFIVTTDLEADGSPKKDKEGNIKRSFRAPKDDDWTLIKKKTEADIDKIKMTVGAYIYDTLLQKPDQKIRGKLVRTIERKYYKNELYQILKTQSEFHEELRDKQLYIACLNELYPNNEPRRNSISTRDFCHLFIEDIIFYQRPLKSKKSLIDNCPYEENRYIDKESGEIKHASIKCIAKSHPLYQEFRLWQFIVNLRIYRKETDVDVTQELLPTEADYVTLFEWLNEKKEIDQKAFFKYPPFGFKKTTSNYRWNYVEDKPYPCNETHAQIIARLGKAHIPKAFLSKEKEETLWHILYSIEDKQEIEKALHSFANKNNLSEEFIEQFKNFPPFKKEYGSYSAKAIKKLLPLMRMGKYWSIENIDNGTRIRINKIIDGEYDENIRERVRQKAINLTDITHFRALPLWLACYLVYDRHSEVKDIVKWKTPKDIDLYLKSFKQHSLRNPIVEQVITETLRTVRDIWQQVGHIDEIHIELGREMKNPADKRARMSQQMIKNENTNLRIKALLTEFLNPEFGIENVRPYSPSQQDLLRIYEEGVLNSILELPEDIGIILGKFNQTDTLKRPTRSEILRYKLWLEQKYRSPYTGEMIPLSKLFTPAYEIEHIIPQSRYFDDSLSNKVICESEINKLKDRSLGYEFIKNHHGEKVELAFDKPVEVLSVEAYEKLVHESYSHNRSKMKKLLMEDIPDQFIERQLNDSRYISKVVKSLLSNIVREENEQEAISKNVIPCTGGITDRLKKDWGINDVWNKIVLPRFIRLNELTESTRFTSINTNNTMIPSMPLELQKGFNKKRIDHRHHAMDAIIIACANRNIVNYLNNVSASKNTKITRRDLQTLLCHKDKTDNNGNYKWVIDKPWETFTQDTLTALQKITVSFKQNLRVINKTTNHYQHYENGKKIVSNQSKGDSWAIRKSMHKETVHGEVNLRMIKTVSFNEALKKPQAIVEMDLKKKILAMLELGYDTKRIKNYFEENKDTWQDINPSKIKVYYFTKETKDRYFAVRKPIDTSFDKKKIKESITDTGIQQIMLRHLETKDNDPTLAFSPDGIDEMNRNILILNKGKKHQPIYKVRVYEKAEKFTVGQKGNKRTKFVEAAKGTNLFFAIYETEEIDKDTKKVIRKRSYSTIPLNVVIERQKQGLSSAPEDENGNLPKYILSPNDLVYVPTQEEINKGEVVMPIDRDRIYKMVDSSGITANFIPASTANLIFALPKATAEIYCNGENCIQNEYGIGSPQSKNQKAITGEMVKEICFPIKVDRLGNIIQVGSCILTN

SEQ ID NO: 157 - protein, 1399 aa, Olsenella uli
MNLRNTTDEYNIGLDMGTNSVGWAVTDKAGAIAHFKGKPTLGSRLFDAAQTAAGARIHRSQRRRYVRRRWRLDLLQSLFQDEVSKVDSEFFCRLRQSRLYVGDREKGHADYTWPIFNDSDFNEVDYYKRFPTIYHLRKWLMETDEKADIRLIYLATHNIVKHRGNFLRENNKSLSSRDANPAQAVKSLRLALNDWCSERDYECAWKGEEDDGAIDEAILNVLADGEKGRSDQAKEIAKLTGVDCGDAKQSKQCNEAIAKAIVGLKVEMKNIFGEFPAEKTSYIYLSSDEDVEAVRESCPDDSGELFQALCKLYSAYILQELLSYADPSGQTISANMVAKYKQYGRDLRLLKELTRTYAPQKYDLFFRGETYAGSSDYVVDEARGYTRYNLGTTKANYDDFQKSVKELFKGTDALQDERYQEMMVAFGEQKFLRRLKTSDNGSIYYQLHLEELHTILENQGKHYPFLLSEEDKIESLVSFRIPYYVGPLTRKNAAIGHDGKERFAWSSRKDGMEHAVITPWNWEEIIDRDKSAEDFIMRMTGDCTYLQGEPVLPKCSLLYEEFCALNEFNGAHWTVDGDDERRFDAAQRERIMCDLFRRTRSVTYNKVSDWLERKYNFTGARVRGGQGEHGFESKLGSYIFFCKDVFKTDGLDEADYTMIEQIILWSTLFEDRDILKRKIEEAYGGDRLTSEQIKVICKKRFTGWGRLSKRLLTDIKVNTDTGRKSIMDVLREGNPNNGQRSRTMVFMEVLRDEDLGFQKAIDGLNRDYFREHNNGLMDVNDLPGSPAIRRSINQAVRIVDEIASIARKEPTNIFIEVTREEDDPRKKGKRTKRRYDAIKSALEKFKKDDPSLWKELCEKAPGDMDERLSLYFMQRGKCMYSGRPIKIEELHTGKYEVDHIIPRSYIKDDSFENKVLVYREENQHKTDALLIDSSIRQKMGGYWRMLHDAKLVGDKKFRNLFRNHIDDKAMKGFVARQIVETSQMVKLVQTLFEARYPNTRIVPVKAGISHDLREAAGLVKCREANDFHHAHDAFLACRIGLFIQKRHPSVYDNPIGLARIMRDYARMQAREYKKSHCLAHTQGFIVNSFLSSGFDEETGEIFKDDWDAKAEVEGIRRVLNCRQCFISRMPVEGDTRYGGRYWGETIYSPKGKHKHEIPLKQGLDPNLYGGYSDLLYSYFLIYEASDVSSGERVLRFIGIPTSIAARMANQKRLEEYVSRLALQENLEHVRMVRKIMKKQLIEVDNCRLLVTAADAVTNATELAFSLDEMKIISTCAKCINGADPSAIDKIGNAQDSFFDNLKRRGSDRCALLFSQLKLDKLSQNFYMISSDDKSKILISILDRIRAKSNSVDLSLVGGAKHAAQMKFDFNAKLNNPASSFVLIDQSVTGMFERRTRIGL

SEQ ID NO: 158 - protein, 1398 aa, Veillonella atypica
METQTSNQLITSHLKDYPKQDYFVGLDIGTNSVGWAVTNTSYELLKFHSHKMWGSRLFEEGESAVTRRGFRSMRRRLERRKLRLKLLEELFADAMAQVDSTFFIRLHESKYHYEDKTTGHSSKHILFIDEDYTDQDYFTEYPTIYHLRKDLMENGTDDIRKLFLAVHHILKYRGNFLYEGATFNSNAFTFEDVLKQALVNITFNCFDTNSAISSISNILMESGKTKSDKAKAIERLVDTYTVFDEVNTPDKPQKEQVKEDKKTLKAFANLVLGLSANLIDLFGSVEDIDDDLKKLQIVGDTYDEKRDELAKVWGDEIHIIDDCKSVYDAIILMSIKEPGLTISQSKVKAFDKHKEDLVILKSLLKLDRNVYNEMFKSDKKGLHNYVHYIKQGRTEETSCSREDFYKYTKKIVEGLADSKDKEYILNEIELQTLLPLQRIKDNGVIPYQLHLEELKVILDKCGPKFPFLHTVSDGFSVTEKLIKMLEFRIPYYVGPLNTHHNIDNGGFSWAVRKQAGRVTPWNFEEKIDREKSAAAFIKNLTNKCTYLFGEDVLPKSSLLYSEFMLLNELNNVRIDGKALAQGVKQHLIDSIFKQDHKKMTKNRIELFLKDNNYITKKHKPEITGLDGEIKNDLTSYRDMVRILGNNFDVSMAEDIITDITIFGESKKMLRQTLRNKFGSQLNDETIKKLSKLRYRDWGRLSKKLLKGIDGCDKAGNGAPKTIIELMRNDSYNLMEILGDKFSFMECIEEENAKLAQGQVVNPHDIIDELALSPAVKRAVWQALRIVDEVAHIKKALPSRIFVEVARTNKSEKKKKDSRQKRLSDLYSAIKKDDVLQSGLQDKEFGALKSGLANYDDAALRSKKLYLYYTQMGRCAYTGNIIDLNQLNTDNYDIDHIYPRSLTKDDSFDNLVLCERTANAKKSDIYPIDNRIQTKQKPFWAFLKHQGLISERKYERLTRIAPLTADDLSGFIARQLVETNQSVKATTTLLRRLYPDIDVVFVKAENVSDFRHNNNFIKVRSLNHHHHAKDAYLNIVVGNVYHEKFTRNFRLFFKKNGANRTYNLAKMFNYDVICTNAQDGKAWDVKTSMNTVKKMMASNDVRVTRRLLEQSGALADATIYKASVAAKAKDGAYIGMKTKYSVFADVTKYGGMTKIKNAYSIIVQYTGKKGEEIKEIVPLPIYLINRNATDIELIDYVKSVIPKAKDISIKYRKLCINQLVKVNGFYYYLGGKTNDKIYIDNAIELVVPHDIATYIKLLDKYDLLRKENKTLKASSITTSIYNINTSTVVSLSNKVGIDVFDYFMSKLRTPLYMKMKGNKVDELSSTGRSKFIKMTLEEQSIYLLEVLNLLTNSKTTFDVKPLGITGSRSTIGVKIHNLDEFKIINESITGLYSNEVTIV

SEQ ID NO: 159 - protein, 795 aa, Prevotella disiens
MEKQRILGLDPGTNSLGWAVLDFDNSKQEYNLVRKGEVIFEEGVGKSKRGEFSKAAYRTFYKSTRKHYFRRRLRKIEVLKVLVKYDFCPYLSDDLLKQWHEKKIYPAVKEFMDWQRTSDAEGKNPYYDRHCCLNEKLDLSLKSDRYVLGRALYHLTQRRGFKSNRLIQNNDENEEGKVKKGISELSTEMQEANCNYLGDYFYKLYTEKGNTVQIRKRYTDREKHYKNEFNAICEKQELNETIVKELDKAIFFQRKLKPQRHGVGKCTFEPNNRRCAISHPDFERFRMLCFINNIKIKTPFEENLRPLNNEEKALIEPLFYRKSIKNFDFEEIAKKLAGKNNYCYIKDDSSKQYKFNYRMSQGASTCQTIAKLKSIFGEEWKNGIAETYTNRRKKEGLKKQAEMVDDIWNVLYSVSECDVLKDFAINKLQLDEKTADNFSKTKLAQGFATLSLKAIRKILPFLEQGFGYTEAVFLANIPTVVGKEYWNNEDIRNDIMEEIKTIFYHNTLKTNDSHNTILFCIKDILSNNFDLAPGAIDKLYHPSMINVYKDVIPNEDGILQLGSPKIDAVKNPMAMRSLHIIRKVVNELLREGIINSDTEVRIEYARELNDANKRHAIADWQKKQYGKHQKYRKEIKELFKAETGFEIEPNETDILKFELWEEQNHICLYTGQEIGISEFVGENPKYDIEHTIPRSLGGDSTKMNMTLCENKFNRENKQKKLPSELANHSEILERIDDWKKKIYILQKKYDSIRTHNGMDKENKDKKIVSMQVRISGSSICVYSQNTLLWLQYGYN

SEQ ID NO: 160 - protein, 1428 aa, Burkholderiales bacterium
MGKTHIIGVGLDLGGTYTGTFITSHPSDEAEHRDHSSAFTVVNSEKLSFSSKSRTAVRHRVRSYKGFDLRRRLLLLVAEYQLLQKKQTLAPEERENLRIALSGYLKRKGYARTEAETDTSVLESLDPSVFSSAPSFTNFFNDSEPLNIQWEAIANSPETTKALNKELSGQKEADFKKYIKTSFPEYSAKEILANYVEGRRAILDASKYIANLQSLGHKHRSKYLSDILQDMKRDSRITRLSEAFGSTDNLWRIIGNISNLQERAVRWYFNDAKFEQGQEQLDAVKLKNVLVRALKYLRSDDKEWSASQKQIIQSLEQSGDVLDVLAGLDPDRTIPPYEDQNNRRPPEDQTLYLNPKALSSEYGEKWKSWANKFAGAYPLLTEDLTEILKNTDRKSRIKIRSDVLPDSDYRLAYILQRAFDRSIALDECSIRRTAEDFENGVVIKNEKLEDVLSGHQLEEFLEFANRYYQETAKAKNGLWFPENALLERADLHPPMKNKILNVIVGQALGVSPAEGTDFIEEIWNSKVKGRSTVHSICNAIENERKTYGPYFSEDYKFVKTALKEGKTEKELSKKFAAVIKVLKMVSEVVPFIGKELRLSDEAQSKFDNPYSLAQLYNLIETERNGFSKVSLAAHLENAWRMTMTDGSAQCCRLPADCVRPFDGFIRKAIDRNSWEVAKRIAEEVKKSVDFTNGTVKIPVAIEANSFNFTASLTDLKYIQLKEQKLKKKLEDIQRNEENQEKRWLSKEERIRADSHGICAYTGRPLDDVGEIDHIIPRSLTLKKSESIYNSEVNLIFVSAQGNQEKKNNIYLLSNLAKNYLAAVFGASDLSQITNEIESTVLQLKAAGRLGYFDLLSEKERACARHALFLNSDSEARRAVIDVLGSRRKASVNGTQAWFVRSIFSKVRQALAAWTQETGNELIFDAISVPAADSSEMRKRFAEYRPEFRKPKVQPVASHSIDAMCIYLAACSDPFKTKRMGSQLAIYEPINFDNLFTGSCQVIQNTPRNFSDKTNIANSPIFKETIYAERFLDIIVSRGEIFIGYPSNMPFEEKPNRISIGGKDPFSILSVLGAYLDKAPSSEKEKLTIYRVVKNKAFELFSKVAGSKFTAEEDKAAKILEALHFVTVKQDVAATVSDLIKSKKELSKDSIENLAKQKGCLKKVEYSSKEFKFKGSLIIPAAVEWGKVLWNVFKENTAEELKDENALRKALEAAWPSSFGTRNLHSKAKRVFSLPVVATQSGAVRIRRKTAFGDFVYQSQDTNNLYSSFPVKNGKLDWSSPIIHPALQNRNLTAYGYRFVDHDRSISMSEFREVYNKDDLMRIELAQGTSSRRYLRVEMPGEKFLAWFGENSISLGSSFKFSVSEVFDNKIYTENAEFTKFLPKPREDNKHNGTIFFELVGPRVIFNYIVGGAASSLKEIFSEAGKERS

SEQ ID NO: 161 - protein, 1025 aa, gamma proteobacterium
MGGYMPQLMRYRLALDIGSTSIGWAMIRLSMQNEPIAIIRMGVRIFSDGRNPKDGSSLAVTRRVARQMRRRRDRLLKRKTRLLNALVQKKFFPEDADARKALVVLNPYELRKEGLYRQLSGPEFGRALFHISQRRGFLSNRKTDKKDNDSSVLKKAIVDLRQQLEVENCQTIGEWLFKQQQSGKSVRARLRGKTQKDKAYDFYIDRAMIAHEFDTLWVSQAKYDPLLFNEDARAILRDILLYQRPLKPVKPGRCTLIPDESRAPLALPLTQQARIYQELNHLRITTPALGAQALTVAQRNTIAALLEKSDVTFVKIAKALGLTSTTEFNLQDIKRDRLKGNATAIILARNQYFGRRWHDFNADLQNLIVDKLVNEGSETALIEWLKANTDVDESAAERVSGVTLPEGYGSLSVAALRRLLPALKEDVVVYSEAVKRAGFDSHSALSLIEQTGELYQELPYYGEVLQRHVGFGSGDPNDSPERRFGKIANPTVHIGLNELRKIINALIKRYGNPAEVVVELARDLKLSREKRKEIQEEQKQRQDRNEKRIKDACEILGIDPLVIDRGKRREISQKMQLWDELNPKDAANRRCPYTGDQISIEKLLSAEVEIEHILPFSKTLDDSLNNKTVAMRRANRDKGNRTPYEAFGESLNPDYDYDAILQRASLMPREKRKRFASDGYQQWLRDDKDFLSRALNDTAYLSRIAKEYLTLICPPNSVRAIPGRMTAQLRAMFGLNRLLSEGGIKNREDHRHHAIDAAVIGVTDQGLLQKFSRASARTRELQLSRLVDDMPLPWDTYREHVTRALEHLVVSHKPDHGYQGKMHEDTAWGLRDNGQVTRRVRSEDGGPRQRLLENKNVVKINSTRDFSRHGIDEQGQVNAYKGYVGGSNYCIEIWIDEKGKWNSDVVSTFQAYQIVRELGEKAAWQKLRNPLLSLSAKPLVMRLIIDDVVKMQIAGQNKIMRVVKIAQNGQIFFAEHNEANVDARDKDKNNPFKYISKTAGSLQKAGGIHMAISPIGDARPVRYGR

SEQ ID NO: 162 - protein, 1364 aa, Pediococcus acidilactici
MGDRKYNLGLDIGTSSIGFAAVDENNQPIRVKGKTAIGVRLFEEGKTAADRRGFRTTRRRLSRRRWRINLLNEIFDAHLAEVDPTFLARLKESNRSNLDPKKSFQGSLLFPERKDYQFYEEYPTIYHLRKALMEKDRKFDFREIYLAVHHIIKYRGNFLNGTPMRSFKVENIELDTLFDQLNQLYAEIVPDNELAFDLAQVADVKDVLSSTTIYKMDKKKQLVKMMLLPASNKALQSENKKIVTQFVNAILNYKFKLDVLLQVETDADWSLKLNDEGADDKLEEFTGDLDENRLEIIDLLQRLHNWFSLNEITKDGNSLSAAMVEKYENHHHHLGLLKKVIENHPDAKKAKALKETYTAYVGKTDDKTQNQDDFYKAVEKNLDDSPDAKEIKRLIQLDQFMPKQRTGQNGAIPHQLHQQELDQIIEKQSKYYPFLAEPNPNVKRRKDAPYKLDELIAFKIPYYVGPLVTPEEQAQNGENVFAWMKRKAAGPITPWNFDEKVDRMESANRFIRRMTTKDTYLFGEDVLPAESMIYQKFVVLNELNNLKINGRHLSLKDKQDVYNDLFKQQKTVSIKALQNYYVTKKKAATAPTVGGLADPKKFLSSLSTYIDFKNMFGERVNDPQFQEDLEQIVEWSTIFEDRGIFKAKLQALGWLSEKQIQQLVAKRYKGWGRLSKKLLTGLKNAEGYSILDEMWRSTGNFMQIQSRPEFAALIQQANEKQFEGNDPDNVWENIENILGDAYTSPQNKKAIRQVVKVVQDIEKAVGNPPEKIAIEFTREAAANPQRTQSRLRTLEKLYESAEEVVDAGLTAELAEFKENKHVLSDKYYLYFTQLGRDVYTGDTISLDKLNDYDVDHILPQSFIKDDSLDNRVLTIRAVNNGKSDNVPAKMFGKKMGSFWRYLLDNGMISKRKYNNLITDPDNISKYAQKGFINRQLVETSQVIKLTANILNGIYDKDTEIIEVPAKMNSQMRKMFDLVKVREVNDYHHAFDAYLTIFIGNYLYKCYPKLQPYFVYDNFKKFGNKEDIGHKRFNFLGKIEREKKVVAPETGEILWSNVAPNETIKQIKKVYDYKFMIVSREITTRRAELFNQTVYPKNYHGKLIPIKEDRPTDLYGGYSGNTDAYLAIVALEDKKKGKYFKVVGIPTRVAAKLEKLKQQDSQQYLQALHKVIAPQFTKSTKKGIKKTEFEIVLDKVHYRQLVQDGPVKMMLGSSTYKYNAKQLVLSEKALQVIADDRKFDETQKDDNLIAVYDEILSIVNQSFDLYDINGFRKKLNDNRDQFIDLPAETKYEGRKVVAHGKREMILEILKGLHANAAFGNLKPIGFSTAFGQLQVPNGIILSKNAILIHQSPSGLFERKIKLSDL

SEQ ID NO: 163 - protein, 1364 aa, Peptoniphilus duerdenii
MKNLKEYYIGLDIGTASVGWAVTDESYNIPKFNGKKMWGVRLFDDAKTAEERRTQRGSRRRLNRRKERINLLQDLFATEISKVDPNFFLRLDNSDLYREDKDEKLKSKYTLFNDKDFKDRDYHKKYPTIHHLIMDLIEDEGKKDIRLLYLACHYLLKNRGHFIFEGQKFDTKNSFDKSINDLKIHLRDEYNIDLEFNNEDLIEIITDTTLNKTNKKKELKNIVGDTKFLKAISAIMIGSSQKLVDLFEDGEFEETTVKSVDFSTTAFDDKYSEYEEALGDTISLLNILKSIYDSSILENLLKDADKSKDGNKYISKAFVKKFNKHGKDLKTLKRIIKKYLPSEYANIFRNKSINDNYVAYTKSNITSNKRTKASKFTKQEDFYKFIKKHLDTIKETKLNSSENEDLKLIDEMLTDIEFKTFIPKLKSSDNGVIPYQLKLMELKKILDNQSKYYDFLNESDEYGTVKDKVESIMEFRIPYYVGPLNPDSKYAWIKRENTKITPWNFKDIVDLDSSREEFIDRLIGRCTYLKEEKVLPKASLIYNEFMVLNELNNLKLNEFLITEEMKKAIFEELFKTKKKVTLKAVSNLLKKEFNLTGDILLSGTDGDFKQGLNSYIDFKNIIGDKVDRDDYRIKIEEIIKLIVLYEDDKTYLKKKIKSAYKNDFTDDEIKKIAALNYKDWGRLSKRFLTGIEGVDKTTGEKGSIIYFMREYNLNLMELMSGHYTFTEEVEKLNPVENRELCYEMVDELYLSPSVKRMLWQSLRVVDEIKRIIGKDPKKIFIEMARAKEAKNSRKESRKNKLLEFYKFGKKAFINEIGEERYNYLLNEINSEEESKFRWDNLYLYYTQLGRCMYSLEPIDLADLKSNNIYDQDHIYPKSKIYDDSLENRVLVKKNLNHEKGNQYPIPEKVLNKNAYGFWKILFDKGLIGQKKYTRLTRRTPFEERELAEFIERQIVETRQATKETANLLKNICQDSEIVYSKAENASRFRQEFDIIKCRTVNDLHHMHDAYLNIVVGNVYNTKFTKNPLNFIKDKDNVRSYNLENMFKYDVVRGSYTAWIADDSEGNVKAATIKKVKRELEGKNYRFTRMSYIGTGGLYDQNLMRKGKGQIPQKENTNKSNIEKYGGYNKASSAYFALIESDGKAGRERTLETIPIMVYNQEKYGNTEAVDKYLKDNLELQDPKILKDKIKINSLIKLDGFLYNIKGKTGDSLSIAGSVQLIVNKEEQKLIKKMDKFLVKKKDNKDIKVTSFDNIKEEELIKLYKTLSDKLNNGIYSNKRNNQAKNISEALDKFKEISIEEKIDVLNQIILLFQSYNNGCNLKSIGLSAKTGVVFIPKKLNYKECKLINQSITGLFENEVDLLNL

SEQ ID NO: 164 - protein, 1089 aa, Corynebacterium matruchotii
MNSANVNYRVGIDVGSYSLGMAAIAIDDDGKPTEILSAISLIHDSGVDPDSAKSAATRLATSGIARRTRRLYRRKRKRLAKLDKFISSQGWPLKEFEKYEDPFYPWRVRAELATTAITDQQELGEKLSIALRHIARHRGWRNPYSKVTALYTVTEPSDAFLAMQEECAKQLGRTIPETITVGQLVTGMNLGKTRLRGENSLLAARPRQSDNANEIHTIAKVQGLSNELVRQIIDHVFAAESPKGSAAEQVGKDPLQPTKKRALKASDAFQQYRIAALIGNLRIRGGKGNRRLTTEETRLVFDYLRSLPAKQEPTWQLVAEQLKIDRGNLVGTAIMTDDGERAGAKPPVHDTNRIMENTKIKPLATWWKSADADARAAMVKALSNAEVDDFDSQAGAQVQEFFFGISDEDQEKLDGLHLPIGRAAYSEDTLDRLTKRMIGEGMDLYEARQAEFKISNDWAPPAPEIGERVGNPAVDRVLKATARWLNAAERQWGAPKSVNIEHVRAAFMSESSARELDRDNQQRAKRNVKVVAEMQEKLGIEGRPSRADVWRFQSIQRQNGKCAYCGAEISFKNSEMDHIIPQAGEGSTNTRDNLVAVCRECNSSKSNIAFAVWAENTSRPGVSVQKAIERTHHWVTDSGLRKPEFDKFRKQVCDRLRRKATDEPIDARSLESVAWMANELRSRIAQKFKDGDTKVRVYKGALTAEARRASGISGKLEFVDGKGKSRLDRRHHAVDAAVVAFTSNYVAETLALRSNMKFDQELRRKAPQWREFTGSDHVHQVEWTKWKYRMQALAELLNNALVQDRIVVMHNLRLRLGNGAAHEDTIGKLTRLKVGDAISTTDIDRASSEALWCALTRDPDYDPKTGLPENPNRTIRIHGTHLTASDEITVFPVAAASIPIRDGFAKLGSNYHHVRLFRVPSGKKYKYCLMQVYTVDLLKFRKEDLFTVELKPQTISVRTCEALLRKALANGTAEYLGWLVSDDELLIDTSSFDTPGIVKLREEYGPVNRWRLAGLTSVTRLNLRPLYLSKEGLKPNVNPEIKKIIDNRSWIITVNKLFSSGHVKIIRRDALGRPRLHSAAHLPICWEVK

SEQ ID NO: 165 - protein, 1134 aa, Streptococcus mitis
MNGLVLGLDIGIASEGVGILEKNSGKIIHANSRLFPAATADNNVERRKNRQARRLNRRKKHRGVRFQDLFEDYGLLTDFSKVSINLNPYRLRVDGLNQQLTNEELFIALKNIVKRRGISYLDDASEDGGAVSSDYGKAVEENRKLLAEQTPGQIQLERFEKYGQVRGDFTVVENGEKLRLINVFSTSAYKKEAERILRKQQEFNNQITDEFIEDYLKILTGKRKYYHGPGNEKSRTDYGRFRTDGTTLDNIFGILIGKCTFYPEEYRASKASYTAQEFNLLNDLNNLTVPTETKKLSEEQKKVIVEYAKEAKTLGASTLLKYIAKMIDASVDQIRGYRVDVNNKPEMHTFEVYRKMQSLETISVGELSRNVLDELAHILTLNTEREGMEEAINTKLKDSFSQDQVLELVQFRKNNSSLFSKGWHNFSLKLMMELIPELYETSEEQMTILTRLGKQKSKETSKRTKYIDEKELTEEIYNPVVAKSVRQAIKIINEATKKHGIFDNIVIEMARENNEEDAKKDYIKRQKANQDEKNAAMEKAAFQYNGKKELPDNIFHGHKELATKIRLWHQQGEKCLYTGKTIPISDLIYNQYKYEIDHILPLSLSFDDSLSNKVLALATANQEKGQRTPFQALDSMDDAWSYREFKSYVKDLKSLSNKKKDYLLTEEDISKIEVKQKFIERNLVDTRYSSRVVLNALQDFYKSHQFDTTISVVRGQFTSQLRRKWGLEKSRETYHHHAVDALIIAASSQLRLWKKQNNPLITYKEGQFVDSQTGEIISLTDDEYKELVFKAPYDHFVDTLSSKTFEDSILFSYQVDSKFNRKISDATIYATRKAKLDKEKKEYTYTLGKIKDIYSLGTKTPSKTGFYKFLDLYNKDKSQFLMFQKDRKTWDEVIEKIMEQYRPFKEYDKTGKLVDFNPFEKYRQENEPIRKYSKKGNGPEIKSLKYYDILLGKHKNITPEGSRNTVALLSLNPWRTDVYYNMETKKYEFLGLKYADLPFEEGGAYGISTETYNELREKEGIGKNSEFKFTLYKNDLILIKDTETNCQQIFRFWSRTGKDNPKSFEKHKIELKPYEKARFEKGEELEVLGKVPPSSNQLQKNMQIENLSIYKVKTDVLGNKHFIKKEGDKPKLKF

SEQ ID NO: 166 - protein, 1373 aa, Streptococcus bovis
MTKKNYSIGLDIGTNSVGWAVITDDYKVPAKKMKVLGNTDKKYIKKNLLGALLFDSGETAEATRLKRTARRRYTRRKNRLRYLQEIFAEEMTKVDESFFQRLDESFLRWDDDNKKLGRYPIFGNKADVVKYHQEFPTIYHLRKHLADSSEKADLRLVYLALAHMIKFRGHFLIEGELNAENTDVQKIFADFVGVYDRTFDDSHLSEITVDAASILTEKISKSRRLENLIKYYPTEKKNTLFGNLIALALGLQPNFKMNFKLSEDAKLQFSKDSYEEDLGELLGKIGDDYADLFTSAKNLYDAILLSGILIVDDNSTKAPLSASMIKRYVEHQEDLEKLKEFIKANKSELYHDIFKDKNKNGYAGYIENGVKQDEFYKYLKNTLSKIAGSDYFLDKIEREDFLRKQRTFDNGSIPHQIHLQEMHAILRRQGDYYPFLKENQDRIEKILTFRIPYYVGPLARKDSRFSWAEYHSDEKITPWNFDKVIDKEKSAEKFITRMTLNDLYLPEEKVLPKHSHVYETYAVYNELTKIKYVNEQGKDSFFDSNMKQEIFDHVFKENRKVTKEKLLNYLNKEFPEYRIKDLIGLDKENKSFNASLGTYHDLKKILDKAFLDDKVNEEVIEDIIKTLTLFEDKDMIHERLQKYSDIFTADQLKKLERRHYTGWGRLSYKLINGIRNKENNKTILDYLIDDGSANRNFMQLINDDTLPFKQIIQKSQVVGDVDDIEAVVHDLPGSPAIKKGILQSVKIVDELVKVMGDNPDNIVIEMARENQTTNRGRSQSQQRLKKLQNSLKELGSNILNEEKPSYIEDKVENSHLQNDQLFLYYIQNGKDMYTGDELDIDHLSDYDIDHIIPQAFIKDDSIDNRVLTSSAKNRGKSDDVPSLDIVRARKAEWVRLYKSGLISKRKFDNLTKAERGGLTEADKAGFIKRQLVETRQITKHVAQILDARFNTESDENDKVIRDVKVITLKSNLVSQFRKDFEFYKVREINDYHHAHDAYLNAVVGTALLKKYPKLASEFVYGEYKKYDIRKFITNSSDKATAKYFFYSNLMNFFKRVIRYSNGKVIVRPVVEYSKDTEDIAWDKKSNFRTICKVLSYPQVNIVKKVETQTGGFSKESILPKGDSDKLIPRKTKKAYWDTKKYGGFDSPTVAYSVFVVADVEKGKAKKLKTVKELVGISIMERSFFEENPVEFLENKGYHNIREDKLIKLPKYSLFEFEGGKRRLLASASELQKGNEMVIPGHLVKLLYHAQRINSFNSTKYLDYVSAHKKEFEKVLSCVEDFANLYVDVEKNLSKIRAVADSMDNFSIEEISNSFINLLTLTALGAPADFNFLGEKIPRKRYTSTKECLNATLIHQSITGLYETRIDLSKIGEE

SEQ ID NO: 167 - protein, 1099 aa, Corynebacterium accolens
MSLLYRVGIDVGTYSLGCTAIEVDDNDQPVSILSSVSLIHDSGLDPDQQKRAVTRLASSGVARRTRRLYRRRRRRMVKLENFLTAQGWETLPFERYSDPYLPWHARVALVNGYISDDTQRGQYLSIAFRHIANHRGWRNPYWKVSSLYSPDKPSDAFEQIRKELEASTGRQIPETATVGQLISFAQFGKDRLRGGGKQKDKKKPQEQVNQAVISARLHQIDHAREINEICRVQKIDDTLRKQILDLVFAAESPKGAQKGRVGKDPLQPKLFRALKASDAFQQYRIAALTGNLRIYRNGVTVPLDRDEKLIVFNYLVNLPKKEEPSWLKIAEILNIDRGQLRGTATMTDDGERAGATPPVHDTNRTILDSKVKPLAHWWENASDDERAAMLKSLSNSEVEDFDSPAGAQVQAFFADLDETEQEKLDSLHLPMGRAAYSEDTLMRLTNRMLDENLDLYEARLAEFGIPKDWAPPAPRIGEPVGNPAVDRVLKGVARWLEAAADEWGAPKSVVIEHVRDGFVSKSKAIEIDRANNNRHKRNRELFQKMQENLGIEGKVRSSDLWRYQSVQRQNCQCAYCGSPITYTTCEMDHIVPRAGEGSTNTRDNLVATCHRCNLAKKNIPFAVWAEKSTIPGVSVKEALDRTRHWSEDSGMSKKDFQKFRKNVCERLNRTVVDEPLDARSMESVAWMANELRGRVAQRFQEENTTVNVYRGALTAEARRAAGITDKLRFIDGTGKSRLDRRHHAVDAAVVAFIHNYVAETLAIRSNKKREAQLLQGTSQWKEFTGSDDKHRAVWNAWIPKMQKLAVLLQIALDEDRIVVTSNLRLRLGNGRAHEDTISELKTIRVGDAISVTDIDRASSEALWCALTREPDFDEKDGLPENPNRRIRVHGTWYDAEDEIEVFPVGAGAIKVRGGYAKLSRFHHARVYKIPGKKAPIYCMLRVYNTDLVQHRHEDLFSVELKPQTMSVRQAEPKLRKALAENTAEYLGWLVTDDELIIDTSTFRTGLIEEMQSEFGLVRRWRLDGFDSPSLLTLRPLHMSAEGLPDDCALGSRKIIDTKGWRVSINKVFNAGNTTVVRRDALGRARLTSNAHLPISWKEE

SEQ ID NO: 168 - protein, 1054 aa, Actinobacillus pleuropneumoniae
MKLTPLNYILGLDLGIASVGWAVVEIDEQENPLGLIDVGVRTFDRAEVAKTGESLALARRLARSSRRLVKRRADRIKKVKRLLKSENILLSADEQLPNDVWQLRVKGLDQKLERQEWAAVLLHLLKHRGYLSQRKNESKSENKELGALRSGVAANHQILQSAEYRTPAEIAVKKFHVEEGHIRNQRGAYTHTFSRLDLLAEIELLFTRQTELGNPHTSAKLLENLTALLMWQKPALAGEAILKMLGKCTFEPTEYKAAKNSYSAERFVWLTKLNNLRILEQGAERALTDNERFALLDQPYEKAKFTYAQARTMLALPDEAIFKGVRYQGEDKKAVETKTILMEMKAYHQIRKALENADLKAEWNELKNNSELLDDIGTAFSLHKTDEDICRYLDGKLSESILNALLENLNFDKFIQLSLKALQQILPLMLQGQRYDEAVSAIYGDHYGKKSAEINRLLPTIPADEIRNPVVLRTLTQARKVINAVVRLYGSPARIHIETGREVGKSYQDRKKLEKQQEDNRKHRESAVQKFKEYFPNFVGEPKGKDILKMRLYELQQAKCLYSGKSLELHRLLEKGYVEVDHALPFSRTWDDSFNNKVLVLANENQNKGNLTPYEWLDGKNNSEPWQNFVARVQTSGFSHTKKQRILSHKLDEKGFIERNLNDTRYVVRFLCNFIADNMLLTGKGKRKVFASNGQITALLRGRWGLQKVRDDNDRHHALDAVVVACSTVAMQQKITRFVRYEEGNVFSGERIDRETGEIIPLHFPSPWAFFRENVEIRIFSENPKLELENRLPDYPQYNHEFVQPLFVSRMPTRKMTGQGHMETVKSAKRLDEGLSVLKVPLTQLKLNDLERMVNREREMALYESLKVRLEQFDNDPAKAFAEPFYKKGGALVKAVRVEQTQKSGVLVRDGNGVADNASMVRVDVFTKAGKYFLVPIYTWQVAKGILPNKAVTANVDEIDWLEMDESYQFIFTMYPNDLVKVKLKKEEFFGYYGGLDRATGAIVIKEHDLEKSKGRQGIYRIGVKLALSFEKYQVDELGKNIRPCRPTKRQHVR

SEQ ID NO: 169 - protein, 1369 aa, Lactobacillus iners
MNNNYYLGLDLGTNSVGWAVTDDHYNIIKFHGKHMWGMRLFEEAETAKDRRLHRQARRRRQRLVERINLLEELFDKEISKVDQGFFARKKESDLHFEDKTTKSEYALFNDKSYTDRDYYKQYPTIFHLIMDLIENDKKRDIRLVYLACHYLIKHRGHFIFDGKNFTVDNSFENLLDKLITYLKDNDDITLSFPKDQLINIFKNSNLNSTEKSDQLKPFFGRTNLEKGIIKLLSGGKQDLSNMFRDETLKNSNYKNLKFSDNRFDDERDGYAADLGDRIDLLILLKQIYDASILESMMSQARVSIDGHKYISSAKVCAYEKHKSDLKRLKSLIKKYLPSEYNNIFRKITEKDNYVAYSKSNITNNKREKALKYVKYVDFTKYLTKKLKTIKTQDAEDDQEIFEIKGELEKQSFLPKQRTLDNSIIPYQLHLMELKKILDNQSKYYDFLLAKDDQEGITVKDKIISLLTFRLPYYIGPVNPAVHGKFAWVKRLANGKVTPWNYKEKIDIDASHEEFIKTKLSKCSFLIGCDVLPKNSLLYQKYMVLSELNTIKFNGVNISEKLKDDIYQNLFKNIQKVTKKRLQNYIKEHENIIGDVIVTGIDNAFKQGLVSYLKFKKIIGDKVDDDRYQKVLEKIIRDITLYDECAGKKIKKEYKDSDLFTEDELNKIVKLTFNDWGRLSAELLDQLEGEDTVSGETGKIIEFMQKHNYNLMQLMSKKFTFKSKIDEINKSYYQHDKFNYKSMIDSLYVSPATKRILWQSLKVVHEISKIMKHDPEKIFIEMARSKEDHPKRKLSRKADLKQVYKDSKKQIISIIGKDKYQDLSNELDNKDDRDLRWDNLYLYYTQLGRSMYSLKPIDISELMNKNLYDQDHIFPKSKKYDDSIENRVLVEKELNVKKSDIYPISDANIIPQKIKGQVESFWKMLYDHKLIGDKKYARLIRSKAFTDDELAGFIARQLVETRQATKETADLLKRLCPKSRIVYAKAQNASIFRQKFDIPKSRTINDLHHAQDAYLNIVVGNIFDTKFTQDPRNFIKNTKDSRNYNLEKIYDYNVERNNYVAWIAPDGETNGTIANVKCNLSTKDFRVTRPSFYKKGALFNQNLSRKGSNLAPIKEHSPKSNPLKYGGYSGKNNSFFVVVAGKDNKGKDIVKLIPVNTLIYNKMLHCDYKAKQELLTSYVANNFAINNFRIVKDDIKMYSLVKIDGAYYYLVGGTDERIEVKNAMQLLLSKDSIKAVKILEKESKDQFANIKNYKDIDIKLGRTFNEVVSKYTNSVFGKSMLISDKYRKDIFKSVEKSILEFNHLDTIGKADNLLKFVTLMRPSGSAHSLKMVGLIERIRKSNVISNFNEFKLINQSVTGLFENEEDLLKL

SEQ ID NO: 170 - protein, 1420 aa, Bifidobacterium bifidum
MSRKNYVDDYAISLDIGNASVGWSAFTPNYRLVRAKGHELIGVRLFDPADTAESRRMARTTRRRYSRRRWRLRLLDALFDQALSEIDPSFLARRKYSWVHPDDENNADCWYGSVLFDSNEQDKRFYEKYPTIYHLRKALMEDDSQHDIREIYLAIHHMVKYRGNFLVEGTLESSNAFKEDELLKLLGRITRYEMSEGEQNSDIEQDDENKLVAPANGQLADALCATRGSRSMRVDNALEALSAVNDLSREQRAIVKAIFAGLEGNKLDLAKIFVSKEFSSENKKILGIYFNKSDYEEKCVQIVDSGLLDDEEREFLDRMQGQYNAIALKQLLGRSTSVSDSKCASYDAHRANWNLIKLQLRTKENEKDINENYGILVGWKIDSGQRKSVRGESAYENMRKKANVFFKKMIETSDLSETDKNRLIHDIEEDKLFPIQRDSDNGVIPHQLHQNELKQIIKKQGKYYPFLLDAFEKDGKQINKIEGLLTFRVPYFVGPLVVPEDLQKSDNSENHWMVRKKKGEITPWNFDEMVDKDASGRKFIERLVGTDSYLLGEPTLPKNSLLYQEYEVLNELNNVRLSVRTGNHWNDKRRMRLGREEKTLLCQRLFMKGQTVTKRTAENLLRKEYGRTYELSGLSDESKFTSSLSTYGKMCRIFGEKYVNEHRDLMEKIVELQTVFEDKETLLHQLRQLEGISEADCALLVNTHYTGWGRLSRKLLTTKAGECKISDDFAPRKHSIIEIMRAEDRNLMEIITDKQLGFSDWIEQENLGAENGSSLMEVVDDLRVSPKVKRGIIQSIRLIDDISKAVGKRPSRIFLELADDIQPSGRTISRKSRLQDLYRNANLGKEFKGIADELNACSDKDLQDDRLFLYYTQLGKDMYTGEELDLDRLSSAYDIDHIIPQAVTQNDSIDNRVLVARAENARKTDSFTYMPQIADRMRNFWQILLDNGLISRVKFERLTRQNEFSEREKERFVQRSLVETRQIMKNVATLMRQRYGNSAAVIGLNAELTKEMHRYLGFSHKNRDINDYHHAQDALCVGIAGQFAANRGFFADGEVSDGAQNSYNQYLRDYLRGYREKLSAEDRKQGRAFGFIVGSMRSQDEQKRVNPRTGEVVWSEEDKDYLRKVMNYRKMLVTQKVGDDFGALYDETRYAATDPKGIKGIPFDGAKQDTSLYGGFSSAKPAYAVLIESKGKTRLVNVTMQEYSLLGDRPSDDELRKVLAKKKSEYAKANILLRHVPKMQLIRYGGGLMVIKSAGELNNAQQLWLPYEEYCYFDDLSQGKGSLEKDDLKKLLDSILGSVQCLYPWHRFTEEELADLHVAFDKLPEDEKKNVITGIVSALHADAKTANLSIVGMTGSWRRMNNKSGYTFSDEDEFIFQSPSGLFEKRVTVGELKRKAKKEVNSKYRTNEKRLPTLSGASQP

SEQ ID NO: 171 - protein, 1092 aa, Ilyobacter polytropus
MKYSIGLDIGIASVGWSVINKDKERIEDMGVRIFQKAENPKDGSSLASSRREKRGSRRRNRRKKHRLDRIKNILCESGLVKKNEIEKIYKNAYLKSPWELRAKSLEAKISNKEIAQILLHIAKRRGFKSFRKTDRNADDTGKLLSGIQENKKIMEEKGYLTIGDMVAKDPKFNTHVRNKAGSYLFSFSRKLLEDEVRKIQAKQKELGNTHFTDDVLEKYIEVFNSQRNFDEGPSKPSPYYSEIGQIAKMIGNCTFESSEKRTAKNTWSGERFVFLQKLNNFRIVGLSGKRPLTEEERDIVEKEVYLKKEVRYEKLRKILYLKEEERFGDLNYSKDEKQDKKTEKTKFISLIGNYTIKKLNLSEKLKSEIEEDKSKLDKIIEILTFNKSDKTIESNLKKLELSREDIEILLSEEFSGTLNLSLKAIKKILPYLEKGLSYNEACEKADYDYKNNGIKFKRGELLPVVDKDLIANPVVLRAISQTRKVVNAIIRKYGTPHTIHVEVARDLAKSYDDRQTIIKENKKRELENEKTKKFISEEFGIKNVKGKLLLKYRLYQEQEGRCAYSRKELSLSEVILDESMTDIDHIIPYSRSMDDSYSNKVLVLSGENRKKSNLLPKEYFDRQGRDWDTFVLNVKAMKIHPRKKSNLLKEKFTREDNKDWKSRALNDTRYISRFVANYLENALEYRDDSPKKRVFMIPGQLTAQLRARWRLNKVRENGDLHHALDAAVVAVTDQKAINNISNISRYKELKNCKDVIPSIEYHADEETGEVYFEEVKDTRFPMPWSGFDLELQKRLESENPREEFYNLLSDKRYLGWFNYEEGFIEKLRPVFVSRMPNRGVKGQAHQETIRSSKKISNQIAVSKKPLNSIKLKDLEKMQGRDTDRKLYEALKNRLEEYDDKPEKAFAEPFYKPTNSGKRGPLVRGIKVEEKQNVGVYVNGGQASNGSMVRIDVFRKNGKFYTVPIYVHQTLLKELPNRAINGKPYKDWDLIDGSFEFLYSFYPNDLIEIEFGKSKSIKNDNKLTKTEIPEVNLSEVLGYYRGMDTSTGAATIDTQDGKIQMRIGIKTVKNIKKYQVDVLGNVYKVKREKRQTF

SEQ ID NO: 172 - protein, 994 aa, Streptococcus downei
MENQRGKRQRITHQEPYSIGLDIGTASVGSAVINNDLTVPQKRFKVRDINGNVIKTIKKNMSSVLIFDEANPAKGARTKRTSRRRYTRRNFRLLELKKLFEKEIEKIDPNFFHRIKEDSFFNWNDKEFDKHPLFGNLKEEKKFHNNYPTVFHLRNEIGKNSSKKFDLRLVYLALAHIIKYRGHFLDETFDPDASVSVEKRLNDFIVEYNELFDKDLRSEAKFSEILMSDSSNSVKIESTLSLYPSEKNTIFQVFLKLIVGNQGDFNKFFKDELESSSHSGKLVFSSDEVEDEKEELISIIGEDYLDIINLCQSLYSTVALAKIISTDTGESNTPLSASMVKRYNEHKGDLANLKGIVKHFIPEKYEEVFGEHSKTGYTAYIRNPNKMPEKKFYDYLYHEGEKGKISGILSDSRIYELPAVQKFILKIEQKSFLKKQRTKENGLIPYQLHLKELKIIIENQSEYYPFLHEIEEKLEKLLTFRIPYFVGPLAQTKYINPRFNWLVRKSEDHIKPWNFSEIVDEEKSATKFIEKLISNDQFLFGEKVLPKRSIIYQQFLIFNELTKVSYQIKDGPSRNFDSETKEEIFNSLFKKNKLGCVTVVDLKNYIKNDQCLSEKEDIQIEGIKKKFNSSYSTYADLSEISGLKELLDDDTQLDLVEEIIRILTVFEDKKMRTKQLEKLNLPANVDIEKLCKKHYKGWANVSRQLIDGIADRSRGFKKTILDYLKDDDIPNNDAFSTKVQKSLNRNFAQLITDKSLDFARKLDESYKIDVKKDYPSLVEDIPGSPAIRRAILQSLYTVDEIIGVMGRMPKNIVIEMARTNEVSDSPKTRKERIKKLIKETENDADALNFGISKVSEIFDEVKKDENLFKELEVYLYFLQEGKDMYGTETREGHRQPKEINFYDVKNSTGKYHIDHIIPQSLYSGNPLDNIVLTESTNNKIKDKDVPDEATVYEMKNFWLYLMKKGAISKKKFSFLTKIEQGGLSNEDKFGFINR

SEQ ID NO: 173 - protein, 1052 aa, Aminomonas paucivorans
MIGEHVRGGCLFDDHWTPNWGAFRLPNTVRTFTKAENPKDGSSLAEPRRQARGLRRRLRRKTQRLEDLRRLLAKEGVLSLSDLETLFRETPAKDPYQLRAEGLDRPLSFPEWVRVLYHITKHRGFQSNRRNPVEDGQERSRQEEEGKLLSGVGENERLLREGGYRTAGEMLARDPKFQDHRRNRAGDYSHTLSRSLLLEEARRLFQSQRTLGNPHASSNLEEAFLHLVAFQNPFASGEDIRNKAGHCSLEPDQIRAPRRSASAETFMLLQKTGNLRLIHRRTGEERPLTDKEREQIHLLAWKQEKVTHKTLRRHLEIPEEWLFTGLPYHRSGDKAEEKLFVHLAGIHEIRKALDKGPDPAVWDTLRSRRDLLDSIADTLTFYKNEDEILPRLESLGLSPENARALAPLSFSGTAHLSLSALGKLLPHLEEGKSYTQARADAGYAAPPPDRHPKLPPLEEADWRNPVVFRALTQTRKVVNALVRRYGPPWCIHLETARELSQPAKVRRRIETEQQANEKKKQQAEREFLDIVGTAPGPGDLLKMRLWREQGGFCPYCEEYLNPTRLAEPGYAEMDHILPYSRSLDNGWHNRVLVHGKDNRDKGNRTPFEAFGGDTARWDRLVAWVQASHLSAPKKRNLLREDFGEEAERELKDRNLTDTRFITKTAATLLRDRLTFHPEAPKDPVMTLNGRLTAFLRKQWGLHKNRKNGDLHHALDAAVLAVASRSFVYRLSSHNAAWGELPRGREAENGFSLPYPAFRSEVLARLCPTREEILLRLDQGGVGYDEAFRNGLRPVFVSRAPSRRLRGKAHMETLRSPKWKDHPEGPRTASRIPLKDLNLEKLERMVGKDRDRKLYEALRERLAAFGGNGKKAFVAPFRKPCRSGEGPLVRSLRIFDSGYSGVELRDGGEVYAVADHESMVRVDVYAKKNRFYLVPVYVADVARGIVKNRAIVAHKSEEEWDLVDGSFDFRFSLFPGDLVEIEKKDGAYLGYYKSCHRGDGRLLLDRHDRMPRESDCGTFYVSTRKDVLSMSKYQVDPLGEIRLVGSEKPPFVL

SEQ ID NO: 174 - protein, 1023 aa, Helicobacter cinaedi
MKIYSFDIGVASIGWAFIENEVLQDCGIRIFTKAENPKNGASLALPRREARGVRKRLARRRGRLNTIKQLLCKEFGLQLEDYLSNDGELPKAYTASKANPLKSPYELRTLALSQKLDSKDLVRVILHIAKHRGYGNKHAKDSKDTESGKVKKAIEFNRKTLAEKGYRSVGEYLYREFFQQSRISQNNGATEFINVRNKAGNYEHCVAQDMLKEELESILNAQRQFGFSLKQDFENKLLTKIFEQRPLKSFADKVGNCCFIAGEKRAPKDSPSAIEFIALSRTINTLINLSKESGEIYNRAIILQIVESTLKKGEISYKELREIIRLDERLRFKDPRLDYSREIKEAEKVKFLEFKQLKGFKKALGESFTTLAISQLDEIAEHIALIKDRVKLNEKLESYALTKEQREALSNLSFSAHINLSLQALKQILPFMRGDNGEQCLDYDESVEKAGLKALSKDTLKGQMLPPLNEFEPYLSNPVVARALAEYRKVLNVLLKQYGSPHKIHIEYAREAKLSSTERQKYEKEQKDNYAANQAAHKKCQELGLEPSSTNLLKLKLWQEQGGLCLYSGAKITISYLQDPTALQVDHIYPYSRSFDDSYMNKCLVLTKANQEKGNRTPFEAFGTDSAKWGVITTLAQKLPHKKRRRILNTAFNDKEAGFKLRNLNDTSYIARLVADYTETYLEFLPLVESENTTLSKGQKGSKKHIAIVNGVLTSTMRYYLGFASKDRDNHLHHALDAVIIGFMNDSVIKAFSDFKKTQETSKAAYYAHTLSKQEYKKQRAFIQLPSGENFRVSVLEKVESVFVSKPPRKRVRGALHEATFYSPNDPKLLKNYGGTKGVERALALGKMRKVGAKIVSNGAMVRVDIFRHKSSGKFYGVPVYTMDFALGILPNKAVVVGKDQNGVIKDWLEMDSSYEFIFSLYKDDVILVQKKEMQRPELCYFVSFDTSGASIKVAKHDNNFSTLTENQKLLFSNATKEEVVGKSIGIQNLKVFEKWQVSVLGEVKRTQSYPRENISLASKAKK

SEQ ID NO: 175 - protein, 874 aa, Listeria seeligeri
LANGQSEFSWLTRKADGEIRPWNIEEKVDFGKSAIDFIEKMTNKDTYLPKENVLPKHSMCYQKYMVYNELTKIRYTDDQGKTHYFSGQEKQQIFNDLFKQKRKVKKKDLELFLYNMNHVESPTVEGVEDAFNSSFTTYHDLQKVGVPQEILDDPLNTEMLEEIIKILTVFEDKRMINERLQEFSNVLDEAVLKKLERRHYTGWGRLSAKLLIGIRDKESHLTILDYLMNDDKHNRNLMQLINDSNLSFKSIIEKEQVSTADKDIQSIVADLAGSPAIKKGILQSLKIVDELVGIMGYPPQTIVVEMARENQTTGKGKNNSKPRFTSLEKAIKELGSQILKEHPTDNQGLKNDRLYLYYLQNGKDMYTGQELDIHNLSNYDIDHVVPQSFITDNSIDNRVLASSAANREKGDNVPSLEVVRKRKVYWEKLYQAKLMSKRKFDYLTKAERGGLTEADKARFIHRQLVETRQITKNVANILHQRFNCKKDESGNVIEQVRIVTLKAALVSQFRKQFQLYKVREVNDYHHAHDAYLNCVVANTLLKVYPQLEPEFVYGDYHQFDWFKANKATAKKQFYTNIMLFFAKKDRIIDENGEILWDKKYLDTIKKVLNYRQMNIVKKTEIQKGEFSNATANPKGNSSKLIPRKADWDPIKYGGFDGSNMAYAIVIEHEKRKKKTVIKKELIQINIMERTAFEKDQKEFLEGKGYRNPKVITKIPKYTLYECENGRRRMLGSANEAQKGNQMVLPNHLMTLLYHAKNCEASDGKSLAYIESHREMFAELLDSISEFASRYTLADANLEKINTIFEQNKSGDVKVIAQSFVNLLEFNAMGAPASFKYFETNIERKRYNNLKELLNATIIYQSITGLYEARKRLDD

SEQ ID NO: 176 - protein, 1082 aa, Neisseria lactamica
MAAFKPNPMNYILGLDIGIASVGWAMVEIDKEENPIRLIDLGVRVFERAEVPKTGDSLAMARRLARSVRRLTRRRAHRLLRARRLLKREGVLQDADFDENGLVKSLPNTPWQLRAAALDRKLTCLEWSAVLLHLIKHRGYLSQRKNEGETADKELGALLKGVADNAHALQTGDFRTPAELALNKFEKESGHIRNQRGDYSHTFSRKDLQAELNLLFEKQKEFSNPHVSDSLKEGIETLLMAQRPALSGDAVQKMLGHCTFEPAEPKAAKNTYTAERFIWLTKLNNLRILEQGSERPLTDTERATLMDEPYRKSKLTYAQARKLLGLEDTAFFKGLRYGKDNAEAPTLMEMKAYHAISRALEKEGLKDKKSPLNLSTELQDEIGTAFSLFKTDKDITGRLKDRVQPEILEALLKHISFDKFVQISLKALRRIVPLMEQGKRYDEACAEIYGDHYCKKNAEEKIYLPPIPADEIRNPVVLRALSQARKVINCVVRRYGSPARIHIETAREVGKSFKDRKEIEKRQEENRKDREKAAAKFREYFPNFVGEPKSKDILKLRLYEQQHGKCLYSGKEINLVRLNEKGYVEIDHALPFSRTWDDSFNNKVLVLGSENQNKGNQTPYEYFNGKDNSREWQEFKARVETSRFPRSKKQRILLQKFDEEGFKERNLNDTRYVNRFLCQFVADHILLTGKGKRRVFASNGQITNLLRGFWGLRKVRAENDRHHALDAVVVACSTVAMQQKITRFVRYKEMNAFDGKTIDKETGEVLHQKAHFPQPWEFFAQEVMIRVFGKPDGKPEFEEADTPEKLRTLLAEKLSSRPEAVHEYVTPLFVSRAPNRKMSGQGHMETVKSAKRLDEGISVLRVPLTQLKLKGLEKMVNREREPKLYDALKAQLETHKDNPAKAFAEPFYKYDKAGNRTQQVKAVRIEQVQKTGVWVRNHNGIADNATMVRVDVFEKGGKYYLVPIYSWQVAKGILPDRAVVAFKDEEDWTVMDDSFEFRFVLYANDLIKLTAKKNEFLGYFVSLNRATGAIDIRTHDTDSTKGKNGIFQSVGVKTALSFQKNQIDELGKEIRPCRLKKRPPVR

SEQ ID NO: 177 - protein, 1326 aa, Streptococcus pseudoporcinus
MLGTVLFDSGETAQARRLKRTNRRRYTRRRYRLCQLQNIFATEMVKVDDTFFQRLSESFFYYQDKAFDKHPIFGNSKEERAYHKTYPTIYHLRKDLADRDQKADLRLIYLALSHIIKFRGHFLIEGKLNSENTDVQKLFIALVTVYNLLFEEEPIAGETCDAKALLTAKTSKSKRLESLISEFPGQKKNGLFGNLLALALGLRPNFKSNFGLSEDAKLQITKDTYEEELDNLLAEIGDHYADLFLAAKNLSDAILLSDILTLSDENTRAPLSASMIKRYEEHQEDLALLKKLVKEQMPEKYWEIFSNAKKNGYAGYIEGKVSQEDFYRYIKPILSRLKGGDEFLAKIDRDDFLRKQRTFDNGSIPHQIHLKELHAILRRQEKYYPFLAEQKEKIEQLLCFRIPYYVGPLAKGGNSSFAWLKRRSDEPITPWNFKDVVDEEASAQAFIEGMTNYDTYLPEEKVLPKHSPLYEMFTVYNELTKVKYIAENMTKPLYLSAEQKEAIIDHLFKQTRKVTVKDLKEKYFSQIEGLENVDVTGVEGAFNASLGTYNDLLKIIKDKAFLDDEANAEILEEIVLILTLFQDEKLIEKRLAKYANLFEKSVLKKLRKRHYRGWGRLSRQLIDGMKDKASGKTILDFLKADDFANRNFIQLINDSSLDFEKLIDDAQKKAIKRESLTEAVANLAGSPAIKKGILQSLKVVDEIVKVMGHNPDNIVIEMSRENQTTAQGLKNARQRLKKIKEVHKKTGSRILEDNSERITNLTLQDNRLYLYLLQDGKDMYTGQDLDINNLSQYDIDHIIPQSFIKDNSIDNLVLTTQKANRGKSDNVPSIEVVRDMKDRVWRRQLANGAISRQKFDHLTKAERGGLADSDKARFLRRQLVETRQITKHVAQLLDSRFNSKSNQNKKLARNVKIITLKSKIVSDFRKDFGLYKLREVNNYHHAHDAYLNAVVGTALLKKYPKLEAEFVYGDYKHFDLVKLISKSDPSLGKATAKVFFYSNIMNFFKEELSLADGTLMKRPVIETNTETGEVVWDKVKDFKTIRKVLSYPQVNIVKKTEIQSGAFSKESVLSKGNSDKLIERKKGWDPKKYGGFDSPNTAYSIFVVAKVAKRKAQKLKTVKEIVGITIMEQAEYEKDNIAFLEKKGYQDIQEKLLIKLPKYSLFELENGRRRLLASANEFQKGNELALSGKYMKFLYLASRYDKLSSKIESEQQKKLFVEQHLHYFDEILDIVVKHATCYIKAENNLKKIISLYKKKEAYSINEQALNMLNLFIFTSLGAPSTFVFFDETIDRKRYTTSSDVLNGILIQQSITGLYETRIDLSRFGGD

SEQ ID NO: 178 - protein, 1150 aa, Enterococcus faecalis
MYSIGLDLGISSVGWSVIDERTGNVIDLGVRLFSAKNSEKNLERRTNRGGRRLIRRKTNRLKDAKKILAAVGFYEDKSLKNSCPYQLRVKGLTEPLSRGEIYKVTLHILKKRGISYLDEVDTEAAKESQDYKEQVRKNAQLLTKYTPGQIQLQRLKENNRVKTGINAQGNYQLNVFKVSAYANELATILKTQQAFYPNELTDDWIALFVQPGIAEEAGLIYRKRPYYHGPGNEANNSPYGRWSDFQKTGEPATNIFDKLIGKDFQGELRASGLSLSAQQYNLLNDLTNLKIDGEVPLSSEQKEYILTELMTKEFTRFGVNDVVKLLGVKKERLSGWRLDKKGKPEIHTLKGYRNWRKIFAEAGIDLATLPTETIDCLAKVLTLNTEREGIENTLAFELPELSESVKLLVLDRYKELSQSISTQSWHRFSLKTLHLLIPELMNATSEQNTLLEQFQLKSDVRKRYSEYKKLPTKDVLAEIYNPTVNKTVSQAFKVIDALLVKYGKEQIRYITIEMPRDDNEEDEKKRIKELHAKNSQRKNDSQSYFMQKSGWSQEKFQTTIQKNRRFLAKLLYYYEQDGICAYTGLPISPELLVSDSTEIDHIIPISISLDDSINNKVLVLSKANQVKGQQTPYDAWMDGSFKKINGKFSNWDDYQKWVESRHFSHKKENNLLETRNIFDSEQVEKFLARNLNDTRYASRLVLNTLQSFFTNQETKVRVVNGSFTHTLRKKWGADLDKTRETHHHHAVDATLCAVTSFVKVSRYHYAVKEETGEKVMREIDFETGEIVNEMSYWEFKKSKKYERKTYQVKWPNFREQLKPVNLHPRIKFSHQVDRKANRKLSDATIYSVREKTEVKTLKSGKQKITTDEYTIGKIKDIYTLDGWEAFKKKQDKLLMKDLDEKTYERLLSIAETTPDFQEVEEKNGKVKRVKRSPFAVYCEENDIPAIQKYAKKNNGPLIRSLKYYDGKLNKHINITKDSQGRPVEKTKNGRKVTLQSLKPYRYDIYQDLETKAYYTVQLYYSDLRFVEGKYGITEKEYMKKVAEQTKGQVVRFCFSLQKNDGLEIEWKDSQRYDVRFYNFQSANSINFKGLEQEMMPAENQFKQKPYNNGAINLNIAKYGKEGKKLRKFNTDILGKKHYLFYEKEPKNIIK

SEQ ID NO: 179 - protein, 1150 aa, Enterococcus faecalis
MYSIGLDLGVSSVGWSVIDERTGNVIDLGVRLFSAKNSEKNLERRTNRGGRRLIRRKTNRLKDAKKILAAVGFYEDKSLKNSCPYQLRVKGLTEPLSKGEIYKVTLHILKKRGISYLDEDDTEAAKESQDYKEQVRENAQLLTKYTPGQIQLQRLKENNRVKTGINAQGNYQLNVFKVSAYANELATILKTQQAFYPNELTDDWIALFVQPGIAEEAGLIYRKRPYYHGPGNEANNSPYGRWSDFKKTGQPATNIFDKLIGKDFQGELRASGLSLSAQQYNLLNDLTNLKIDGEIPLSPEQKEYILAELMTKEFTRFGINDVAKLLGVKKERLSGWRLDKKGKPEIHTLKGYRNWRKIFAESGIDLATLPTETIDCLAKVLTLNTEREGIENTLAFELPELAESVKLLVLDRYKELSQSVSTQAWHRFSLKTLHLLIPELMNATSEQNTLLEQFQLKSDVRKRYSEYKKLPTKDVLTEIYNPTVNKTVSQAFKVIDALLVKYGKEQIRYITIEMPRDDNEEDEKKRIKELHAKNSQRKNDSQSYFMQKSGWSQEKFQTTIQKNRRFLAKLLYYYEQDGICAYTGLSISPELLVSDSTEIDHIIPISISLDDSINNKVLVLSKANQVKGQQTPYDAWMDGSFKKINGKFSNWDDYQKWVESRHFSHKKENNLLETRNIFDSEQVEKFLARNLNDTRYASRLVLNTLQSFFANQETKVRVVNGSFTHTLRKKWGADLDKTRETHHHHAVDATLCAVTPFVKVSRYHYAVKEETGEKVMREIDFETGEIVDEMSYREFKKSKKYERKTYQVKWPNFREQLKPVNLHPRIKFSHQVDRKANRKLSDATIYSVREKTEVKTLKSGKQKITTDEYTIGKIKDIYTVDGWEAFKKKQDKLLMKDLDEKTYERLLSIAETTPDFQEVEEKNGKVKRVKRSPFAVYCEENDIPAIRKYAKNNNGPLIRSLKYYDGKLNKHINITKDSQGRPVEKTKNGRKVTLQSLKPYRYDIYQDLETKAYYTVQLYYSDLRFVEGKYGITEKEYMKKVAEQTKGQVVRFCFSLQKNDGLEIEWKDSQCYDVRFYNFQSANSINFKGLEQEMMPAENQFKQKPYNNGAINLNIAKYGKEGKKLRKFNTDILGKKHYLYYEKEPKNIIK

SEQ ID NO: 180 - protein, 1345 aa, Streptococcus anginosus
MDQKYSIGLDIGTNSVGWAVVTDDYKVPAKKMKVLGNTDKQSIKKNLLGALLFDSGETAEATRLKRTARRRYTRRRNRLRYLQEIFAEEMNKVDENFFQRLDDSFLVDEDKRGERHPIFGNIAAEVKYHDDFPTIYHLRKHLADISQKADLRLVYLALAHMIKFRGHFLIEGQLKAENTNVQALFKDFVEVYDKTVEESHLSEMTVDALSILTEKVSKSRRLENLIAHYPAEKKNTLFGNLIALSLGLQPNFKTNFQLSEDAKLQFSKDTYEEDLEGLLGEIGDEYADLFASAKNLYDAILLSGILTVDDNSTKAPLSASMVKRYEEHQKDLKKLKDFIKVNAPDQYNAIFKDKNKKGYAGYIENGVKQDEFYKYLKGILLQINGSGDFLDKIDREDFLRKQRTFDNGSIPHQIHLQEMHAILRRQEEHYPFLKENQDKIEKILTFRIPYYVGPLARKGSRFAWAEYKADEKITPWNFDDILDKEKSAEKFITRMTLNDLYLPEEKVLPKHSLLYETFTVYNELTKVKYVNEQGEAKFFDANMKQEIFDHVFKENRKVTKDKLLNYLNKEFEEFRIVNLTGLDKENKAFNSSLGTYHDLRKILDKSFLDDKANEKTIEDIIQTLTLFEDREMIRQRLQKYSDIFTKAQLKKLERRHYTGWGRLSYKLINGIRNKENKKTILDYLIDDGYANRNFMQLINDDALSFKEEIARAQIIGDVDDIANVVHDLPGSPAIKKGILQSVKIVDELVKVMGHNPANIIIEMARENQMTDKGRRNSQQRLKLLQDSLKNLDNPVNIKNVENQQLQNDRLFLYYIQNGKDMYTGETLDINNLSQYDIDHIIPQAFIKDNSLDNRVLTRSDKNRGKSDDVPSIEVVHEMKSFWSKLLSVKLITQRKFDNLTKAERGGLTEEDKAGFIKRQLVETRQITKHVAQILDERFNTEFDGNKRRIRNVKIITLKSNLVSNFRKEFELYKVREINDYHHAHDAYLNAVVGNALLLKYPQLEPEFVYGEYPKYNSYRSRKSATEKFLFYSNILRFFKKEDIQTNEDGEIAWNKEKHIKILRKVLSYPQVNIVKKTEEQTGGFSKESILPKGESDKLIPRKTKNSYWNPKKYGGFDSPVVAYSILVFADVEKGKSKKLRKVQDMVGITIMEKKRFEKHPVDFLEQRGYRNVRLEKIIKLPKYSLFELENKRRRLLASARELQKGNELVIPQRFTTLLYHSYQIEKNYEPEHREYVEKHKDEFKELLEYISVFSRKYVLADNNLTKIEMLFSKNKDAEVSSLAKSFISLLTFTAFGAPAAFNFFGENIDRKRYTSVTECLNATLIHQSITGLYETRIDLSKLGED

SEQ ID NO: 181 - protein, 849 aa, Listeria ivanovii
  misc_feature (780)..(780): Xaa can be any naturally occurring amino acid
LIDKNGTPQHITMIDKMRGKCTYFPEEVRIAKMSYTAELFGLLNDFNNIYFADPETGEKIGFTEADKKYFIDTFIHDQKGVKNITLKQIMKHKNIINETDIFGYRINTKNGTPIFTEFKGLKALKKALKEVDLPDEFYQNTEMMDEIANILSSEKSFTRREEQLKELFLAAFNDELEEAVKELINDITFKEFHSLSKKAIMVILPELWSTNQNQMQLFVQHKMDKSRLENLQNGTKIQFDDEAILSTIAKRAHRETIKIVDAVRAKYGELDYVIVEMAREKNSDEQKKVYNRAQKKQGDFEKEMCKLLGVSELKELRLNGKQHLALKFWKEQDGKCIYSGKPIALSDIVNNFNGLLEIDHIIPISISYDDSQQNKVLCLRSENQRKGQLSPYQYLIRGMGERSFDAFKAEVLSRHFGKKKQNYLLEMEDIANNDELRKHFINRNLVDTRYAMRTFSNTLKTFYTVNGIPTKVMPVNGAMTSALRKRAKLNKDRDAGHAHHAIDALIVAAIGRLPLIKQLAELRVNEEGEFADKITDKGLDDKTAFDDKTLKFLRNLLNYESKVKYSHKVDRKPNRSLSKQTLYSTREKDGEKYIIGKVKNIYTLDKAGYAALKKRIDKNPEDFLMAQHNPKTWEEIIKIMEVYSKADNPFKEFYDEHGFIMKDGKVPVKSLRYHDKKLGIHVPLTHKYENTRHDVVLLKRNSLRVDIYMNKEGVYKYQGVPYNWFNQKGDKYILDMEKYHNEIDGTRASFKNIDNTFEFQFSLYKNDVFSYMKKDKEGEXVSYTKLFRSDSSPRENRLEVENIDMRTSSQQMPTINPLKNLIKYNTDILGNTYPIQKEKFVTVFTLHSK

SEQ ID NO: 182 - protein, 1457 aa, Prevotella buccae
MKTILGLDLGTNSIGWAKVSVDDYGNYLHDIKLGSRIIPMSQDVLGNFDSGVTVSQTAQRTEFRSKRRLVQRNLQRRERLHRVLHVLDFLPAHYDAAIGWDRTEAVTYGKFLNHAEPKLAWEELGNGKRRFLFMDSFHEMVADFARCQPALVADGKKIPLDWTIYYLRKKALTQAITKEELAWILLNFNQKRGYYQLRGEEEEENPTKQEEYYELKVVSVEATDSRKGNDTWYNVHLENGWIYRRSSKISLDDWVGKVKQFIVTTEYEKDGATLKTDKEGYVKRSFRAPNENDWGLRKKRTETLLEMSGKTVGAFIYDHLLQEPADKIRGNFIRTIERHYYKAELEAILAEQCKYHIELRDKEMLEACARELYLNNLPHQRSLMKKDMTYLLLYDLIFYQRPLKSKKALIANCPYEYYEYVDKETGEIKRQNIKCIAKSNPYFQEFRLWQFVLNLRLFDRVEDKEVTANYLPTADDHARLFTYLNDRKEINQETLLKDYFKLKKVKIGNEKEYPIRWNYIEDKEKKYPCNETRYELLMALDRAGIEHKWLDDNNLEYRLWHLLYSVEVKSESETALRKLKNDDAFVNSFLKVKPFKKEYGAYSEKAIKRLLAVMRKGFLWNEQDICDETRKRIEIIIKGDVDEKVKERMGHAAYSFDRVSDFQGLPEWLACYVVYGRHSEAMDIQHWDSPERLMAYINNFKQYSLRNPIVEQCILETLRTVHDIWKETGQIDEIHVELGREMKSTSEERARRTQNVLRNENTNLRIKSLLIELKNDTDICNVHPYSPMQQEILRIYEEGALQELNREDEDFEEISKISQMSQPSGKELNRYKLWLEQKYRSPYTGKAISLAKLFTPAYQIEHVIPQSRYFDDSFTNKVICEAEVNTLKSNLLGYEFIKKHGGEIIHCTTLGDVRIFSESEYKAFVMDHYANNKSKKDKLLMEDIPQEFLSRQMNDSRYISKVVKTLLSNIVRMADESEATSKSVIVCTGGVTDRLKKDWGLNDVWNSIVYSRFERLNRLTGTEAFGHWENKDGKRVFQTSMPLELQRGFRKKRIDHRHHAMDALVIACASRNIVNYLNNESANNPKKREDLRRQLCDKNRVIRKPWETFTQDAYNALENVVVSFKNYVRVINKATNRYEHYDENGKKRFVQQKGSELWAIRKPMHKETYYGHVNLRRKELVTLQKALDDIPSICDKKLRDYISALVEKHFNKRQLLAHFKSTDYYWQKQYVNKVYVWTFSDDIKPLVATRKLLDTSFDAKRIGTITDTGIQKILRNYLEAKGGNATLAFTPEGIAEMNQNISKYNDGKPHQPILKVRITEPMGAKYRVGQTGNKMAKYVEAQSGTNLYFAIYEDSEGKRSYTTVPLDEVAERLKQRLSPVPEKDENDVPLKFYLSPNDLVYVPTEEELQLRECKLNKDRIYKMVSSTGNECHFIPYYVANVIYNKGGFNMQMHRPQS

SEQ ID NO: 183 - protein, 1330 aa, Enterococcus italicus
MKNDYTIGLDIGTNSVGYSVVTDDYKVISKKMNVFGNTEKKSIKKNFWGVRLFESGQTAQEARMKRTSRRRIARRKNRICYLQEIFQPEMNHLDNNFFYRLNESFLVADDAKYDKHPIFGTLDEEIHFHEQFPTIYHLRKYLADGDEKADLRLVYLAIAHIIKFRGNFLIEGELNTENNSVIELSKVFVQLYNQTLSELEGFQFIDESIDFSEVLTQQLSKSERADNVLKLFPDEKGTGIFAQFIKLIVGNQGNFKKVFQLEEDQKLQLSTDDYEENIENLLAIIGDEYGDIFVAAQNLYQAILLAGILTSTEKTRAKLSASMIQRYEEHAKDLKLLKRFVKEHIPDKYAEIFNDATKNGYAGYIDGKTKEEEFYKYLKTTLVQKSGYQYFIEKIEQENFLRKQRIYDNGVIPHQVHAEELRAILRKQEKYYSFLKENHEKIEQIFKVRIPYYVGPLAKHNEQSRFAWNIRKSDEPIRPWNMNDVVDENASAVAFIERMTIKDIYLNENVLPRHSLIYEKFTVFNELTKVLYADDRGVFQRFSAEEKEDIFEKLFKSERKVTKKKLENYLRIELSISSPSVKGIEEQFNANFGTYLDLKKFDELHPYLDDEKYQDTLEEVIKVLTVFEDRSMIQNQLEQLPLNLSTKTIKALSRRKYTGWGRLSARLIDGIHDKNSGKTILDYLIEDESDSYIVNRNFMQLINDDHLSFKKIIEDSQPYKEQQSAEEIVSELSGSPAIKKGILQSLKIVDELVAIMGYKPKNIVVEMARENQTTGRGKQNSKPRLKGIENGLKEFSDSVLKGSSIDNKQLQNDRLYLYYLQNGKDMYTGHELDIDHLSTYDIDHIIPQSFLTDNSIDNRVLTTSKSNRGKSDNVPSEEVVRKMDRFWRKLLNAKLISERKYTNLTKKELTESDKAGFLKRQLVETRQITKHVATILDSKFNEDSNNRDVQIITLKSALVSEFRKTFNLYKVREINDLHHAHDAYLNAVVALSLLRVYPQLKPEFVYGEYGKNSIHDQNKATIKKQFYSNITRYFASKDYIINDDGEILWNKQETIAQVIKTLGMHQVNVVKKVEIQKGGFSKESIQPKGESQKLIRRKQQWNTKKYGGFDSPVVAYAILLSFDKGKRKARSFKIVGITIQDRESFEGNPILYLSKKDYHNPKVEAILPKYSLFEFENGRRRMVASASETQKGNQLIIPGHLMELLYHSKKIINGKNSDSVSYIQNNKEKFREIFEYIVDFSSKYISADANLNKIEKIFENNFHKASEQEIAKSFINLLTFTAMGAPADFEFFGEKIPRKRYVSISEIIDAVFIHQSITGLYETRVRLTEV

SEQ ID NO: 184 - protein, 1123 aa, Mobiluncus curtisii
MFVYLNSPRGFGPATFLTDLPHFCIIFGNNDFMDNRKYHVGIDVGTNSVGFAAVEVGDSGSPIRFLNTMVVIHDSGVDPEQKKYAITRLASAGTARRTRRLYRTRRQRLRELDDFISNELGYPLVNLENFADPYEPWKVRADLATIKLPADELPEAMSIALRHMARHRGWRSPYQRVEALHLHAEISEEFSALKKRVMEKTGDVFSDDATPAEVLVDLMGRQKIRGADGMLSGKLRQSDNANELRKIASVQGIDDETLNRIIDRVFFSRSPKGKASERVGMDALPGQGSKPRALKAMPSFQKFRIVSVICNLRIKDSGDDNRPLSMEEKEQLIGYLMSSTTDDHVTWTDVAELLHVKRSNLQGTAKEGPDGERPYTRPPVNSAWSKIKDSKIKSLVALWKTGDVDVQSAIVEALSNASVLEDARPGADIVVAYLESLDDKELESLDKVGLPAGRASYSEDSLERLTERMLQDDCDLFEARKREFGVSDDWKPPADPIYAPVGNPGVDRVLKIVNRLLMAAEREWGAPTQINIEHVRSGFSSELMQREFERENERRRAQNEEAVKAILTEKGGNSHVSKYDIIRYYAVKRQNCQCLYCGTPITFSDCELDHIVPRKGVGSTNSRVNLAAACRSCNRDKSNLPFAVWAGKTSNFDVSIDGAVSRVKQWQRSQNEGAREFRAFQNEVISRLLKTTEDPEIDSRSLESVAWMARELHHRVEYYFQSKGAQTQVSVYRGAVTAQARKSSGLEDKVKMIGGGGKTRLDRRHHAMDAATIALMTPGISTTLSEKNNLRDAQKFTGQSETWKDYCGRTETAREHFAVWKSNMERLTDLFNDKLENDAIPVVQPLRLRLSDSKAHDDGIGKLDSKKLGSVWSLADIDRAATPQIWTALTRCDDFDPTKGLPENANRVIRAQGVKYESEDNIPVFPSNVAAIAVRDGYAEIGSTIHHARIYRIDDGKKIFYSMIRVFAVDLLKHQAEDLFTVKLPPSAISIRTCEDSLRRALSNGTAEYLGWLVPGDEIIVDTSDKAFHTGQIGDLLRNFPVNSFRLTGFPSNSRLRLKPVLLAGEGLRDDAEDSIKKILSGQGWRPAINVLFSKGKPRIVRRNSLGIERPSSNNGLPFSWEA

SEQ ID NO: 185 - protein, 1054 aa, Staphylococcus lugdunensis
MNQKFILGLDIGITSVGYGLIDYETKNIIDAGVRLFPEANVENNEGRRSKRGSRRLKRRRIHRLERVKKLLEDYNLLDQSQIPQSTNPYAIRVKGLSEALSKDELVIALLHIAKRRGIHKIDVIDSNDDVGNELSTKEQLNKNSKLLKDKFVCQIQLERMNEGQVRGEKNRFKTADIIKEIIQLLNVQKNFHQLDENFINKYIELVEMRREYFEGPGKGSPYGWEGDPKAWYETLMGHCTYFPDELRSVKYAYSADLFNALNDLNNLVIQRDGLSKLEYHEKYHIIENVFKQKKKPTLKQIANEINVNPEDIKGYRITKSGKPQFTEFKLYHDLKSVLFDQSILENEDVLDQIAEILTIYQDKDSIKSKLTELDILLNEEDKENIAQLTGYTGTHRLSLKCIRLVLEEQWYSSRNQMEIFTHLNIKPKKINLTAANKIPKAMIDEFILSPVVKRTFGQAINLINKIIEKYGVPEDIIIELARENNSKDKQKFINEMQKKNENTRKRINEIIGKYGNQNAKRLVEKIRLHDEQEGKCLYSLESIPLEDLLNNPNHYEVDHIIPRSVSFDNSYHNKVLVKQSENSKKSNLTPYQYFNSGKSKLSYNQFKQHILNLSKSQDRISKKKKEYLLEERDINKFEVQKEFINRNLVDTRYATRELTNYLKAYFSANNMNVKVKTINGSFTDYLRKVWKFKKERNHGYKHHAEDALIIANADFLFKENKKLKAVNSVLEKPEIESKQLDIQVDSEDNYSEMFIIPKQVQDIKDFRNFKYSHRVDKKPNRQLINDTLYSTRKKDNSTYIVQTIKDIYAKDNTTLKKQFDKSPEKFLMYQHDPRTFEKLEVIMKQYANEKNPLAKYHEETGEYLTKYSKKNNGPIVKSLKYIGNKLGSHLDVTHQFKSSTKKLVKLSIKPYRFDVYLTDKGYKFITISYLDVLKKDNYYYIPEQKYDKLKLGKAIDKNAKFIASFYKNDLIKLDGEIYKIIGVNSDTRNMIELDLPDIRYKEYCELNNIKGEPRIKKTIGKKVNSIEKLTTDVLGNVFTNTQYTKPQLLFKRGN

SEQ ID NO: 186 - protein, 586 aa, Pseudoramibacter alactolyticus
MTYYLGLDMGTGSVGWAATDKNYKLIRAKGKDLWGVRLFQTAKTAAERRSHRVARLRRQREKVRIGYLKTIFSDAINKVDPGFFQRLDDSFFYAEDKNINQPYALFADTGYTDVDYYRDYPTIFHLRSTLIHDTSPKDVRLVYLAVLNMFKHRGHFLASNLSENGVDDFGDIYQQWCKSVPKPVQISDPEAKTEKIENILSKAGISNTRRLEALLEVFGIKRRDAFAEVLKLWCGLKGNLSKIWSETDFSDLDNTKPALSFKDSNLDMVLSQLEEILPDEDYSWLMLTKQIYDWSLLSGMMKDASGKSYDYLSDARVASYQKHSEDLKTLKRFYHDNHLSAAYDQMFRVMGKDNYSAYAGSVQSKKEVVRRGASCGIEELYKRIKKDLKPVPDCETKQIILENIERGTFLPKQLTRDNGVIPNQIHVHELKAILKNAENYLPFLKEGSELTNSEKILQLFQFQIPYYVGPLYSDENNYAWVVRKEGGRVFPWNFAEKVDEKASAEGFISELVARCTYLDNEKVLPKASLLYEKFMVLNELNNLRINGERISVDIKQELYQNLFTRGKKVTLKKSEGLFGGQRIFCL

SEQ ID NO: 187 - protein, 1385 aa, Gemella morbillorum
MKNKTWYLGLGVGPTSIGWAATDSNYKLLRKNKKRLWGVRLFEEAKTAVDRRTFRAERRRLARRKWRISLLEELFAKEVSKNDPNFFLRLKESKYHFEDKSLMNEYILFNDKDYTDKDYYKEYPTIYHLRLSLTTEENPDIRKVYLAVHSMLKNRGHFLLQGQSFNDSNIDSVIKELLELETVKINFEVTDEVIHSLKKIALEKKNLSDKNNDVKKLYPKEKQLQEIFKLVFGGKTSLDKLYDIEEYKELDNSVKSISFKEKVYEEVRPDYEQILSNYIELLDLAKLVYDSIVLADIKKEGKTISESKVELYNKHKDDLANLKKLVKIDSKLSEDKKKEVYFTIFKEDKEKGTNYVNYTHRSQEGKSCSYEDFKKFLKKELEKLEDSPTKTTILEELDLETFLPLQRTKDNSVVPYQIHKEELVKILDNAAKYHSFLAEKDDSGYSTREKVVQLFEFRIPYYIGPLNAHHNTENGGYSWAIRKKGMESVPVTPWNFKDVIDESASAEAFVNNLKNKCAYLSGEDVLPKNSLLYSEYALLNELNALRYEGNRISVEARDVIVTKLFKEQGKKVTKKTIKELLKTEGFIDGKGEIVGIDNIVKNDLKSYRDFKKILADKFDKERVENIILWITLYGESRKLIKEKITKVYGDFYTVDEIEKMSRLTYKDWGILSRKLLTELVSEKLYNEETGECLNIIGAMRQGTILFMELLADKFDYMSQIKNHNKENKDDITEITPDILENLHASPAVKRSIWQTVRIVEELKTIIGCVPTKIFIETTKRNNAPYKVPTLNRNDLVTKYKTIREHEIFELEKELKNTLDFTLNKNRLINEEPSKLKATKLYLYYTQLGRCMYTGKKIDLGELFDNNNKYDIDHIYPQSKVKDGSFNNIVLVTKASNDMKADVFPLKSKFQTKENKIFWRFLKEKKLITEEKYNRLVRTEEFSNGELTGFITRQLVETSQAIKVISNVLRELNPETTICYSKAENVSSFRQSFGKIKEANRKAENNEKLIRVQEINDYYNAKDAYLSIVVGNVYDVKFTRNVHNFIKNNKDARRYSLNGLFYTDVKNANTIAWEMDKTVHVVEKTMNNNNILITRRTSEQKGALYDATLYKAKVAEKAKEGTYYPLKTTDSKIKDVGKYGGFTKIKIAYYSIFEYTLDGKKGKQKITRIVPIPIYISQNIKDDKALLEYAQTRLPGKDLKIKYRKLCIGSLVKINNFNYYIGGKTNNNFTFDSAVQVILDKDSESYIKELAKYLNWKKENKDGKLWESITEDKNIQLYDSLVKKMNTGIFIRKTPNKYTELLTLEVKNKFINIDIDEQVKLLLEILNLLTNKKFTSKLNEIGITASRGVCSFNLSNQSQFSIIEQSVTGVYEKEKLIIEKKKEGIL

SEQ ID NO: 188 - protein, 1029 aa, Alicycliphilus denitrificans
MRSLRYRLALDLGSTSLGWALFRLDACNRPTAVIKAGVRIFSDGRNPKDGSSLAVTRRAARAMRRRRDRLLKRKTRMQAKLVEHGFFPADAGKRKALEQLNPYALRAKGLQEALLPGEFARALFHINQRRGFKSNRKTDKKDNDSGVLKKAIGQLRQQMAEQGSRTVGEYLWTRLQQGQGVRARYREKPYTTEEGKKRIDKSYDLYIDRAMIEQEFDALWAAQAAFNPTLFHEAARADLKDTLLHQRPLRPVKPGRCTLLPEEERAPLALPSTQRFRIHQEVNHLRLLDENLREVALTLAQRDAVVTALETKAKLSFEQIRKLLKLSGSVQFNLEDAKRTELKGNATSAALARKELFGAAWSGFDEALQDEIVWQLVTEEGEGALIAWLQTHTGVDEARAQAIVDVSLPEGYGNLSRKALARIVPALRAAVITYDKAVQAAGFDHHSQLGFEYDASEVEDLVHPETGEIRSVFKQLPYYGKALQRHVAFGSGKPEDPDEKRYGKIANPTVHIGLNQVRMVVNALIRRYGRPTEVVIELARDLKQSREQKVEAQRRQADNQRRNARIRRSIAEVLGIGEERVRGSDIQKWICWEELSFDAADRRCPYSGVQISAAMLLSDEVEVEHILPFSKTLDDSLNNRTVAMRQANRIKRNRTPWDARAEFEAQGWSYEDILQRAERMPLRKRYRFAPDGYERWLGDDKDFLARALNDTRYLSRVAAEYLRLVCPGTRVIPGQLTALLRGKFGLNDVLGLDGEKNRNDHRHHAVDACVIGVTDQGLMQRFATASAQARGDGLTRLVDGMPMPWPTYRDHVERAVRHIWVSHRPDHGFEGAMMEETSYGIRKDGSIKQRRKADGSAGREISNLIRIHEATQPLRHGVSADGQPLAYKGYVGGSNYCIEITVNDKGKWEGEVISTFRAYGVVRAGGMGRLRNPHEGQNGRKLIMRLVIGDSVRLEVDGAERTMRIVKISGSNGQIFMAPIHEANVDARNTDKQDAFTYTSKYAGSLQKAKTRRVTISPIGEVRDPGFKG

SEQ ID NO: 189 - protein, 1422 aa, Sutterella wadsworthensis
MTQSERRFSCSIGIDMGAKYTGVFYALFDREELPTNLNSKAMTLVMPETGPRYVQAQRTAVRHRLRGQKRYTLARKLAFLVVDDMIKKQEKRLTDEEWKRGREALSGLLKRRGYSRPNADGEDLTPLENVRADVFAAHPAFSTYFSEVRSLAEQWEEFTANISNVEKFLGDPNIPADKEFIEFAVAEGLIDKTEKKAYQSALSTLRANANVLTGLRQMGHKPRSEYFKAIEADLKKDSRLAKINEAFGGAERLARLLGNLSNLQLRAERWYFNAPDIMKDRGWEPDRFKKTLVRAFKFFHPAKDQNKQHLELIKQIENSEDIIETLCTLDPNRTIPPYEDQNNRRPPLDQTLLLSPEKLTRQYGEIWKTWSARLTSAEPTLAPAAEILERSTDRKSRVAVNGHEPLPTLAYQLSYALQRAFDRSKALDPYALRALAAGSKSNKLTSARTALENCIGGQNVKTFLDCARRYYREADDAKVGLWFDNADGLLERSDLHPPMKKKILPLLVANILQTDETTGQKFLDEIWRKQIKGRETVASRCARIETVRKSFGGGFNIAYNTAQYREVNKLPRNAQDKELLTIRDRVAETADFIAANLGLSDEQKRKFANPFSLAQFYTLIETEVSGFSATTLAVHLENAWRMTIKDAVINGETVRAAQCSRLPAETARPFDGLVRRLVDRQAWEIAKRVSTDIQSKVDFSNGIVDVSIFVEENKFEFSASVADLKKNKRVKDKMLSEAEKLETRWLIKNERIKKASRGTCPYTGDRLAEGGEIDHILPRSLIKDARGIVFNAEPNLIYASSRGNQLKKNQRYSLSDLKANYRNEIFKTSNIAAITAEIEDVVTKLQQTHRLKFFDLLNEHEQDCVRHALFLDDGSEARDAVLELLATQRRTRVNGTQIWMIKNLANKIREELQNWCKTTNNRLHFQAAATNVSDAKNLRLKLAQNQPDFEKPDIQPIASHSIDALCSFAVGSADAERDQNGFDYLDGKTVLGLYPQSCEVIHLQAKPQEEKSHFDSVAIFKEGIYAEQFLPIFTLNEKIWIGYETLNAKGERCGAIEVSGKQPKELLEMLAPFFNKPVGDLSAHATYRILKKPAYEFLAKAALQPLSAEEKRLAALLDALRYCTSRKSLMSLFMAANGKSLKKREDVLKPKLFQLKVELKGEKSFKLNGSLTLPVKQDWLRICDSPELADAFGKPCSADELTSKLARIWKRPVMRDLAHAPVRREFSLPAIDNPSGGFRIRRTNLFGNELYQVHAINAKKYRGFASAGSNVDWSKGILFNELQHENLTECGGRFITSADVTPMSEWRKVVAEDNLSIWIAPGTEGRRYVRVETTFIQASHWFEQSVENWAITSPLSLPASFKVDKPAEFQKAVGTELSELLGQPRSEIFIENVGNAKHIRFWYIVVSSNKKMNESYNNVSKS

SEQ ID NO: 190 - protein, 1132 aa, Nitratifractor salsuginis
MKKILGVDLGITSFGYAILQETGKDLYRCLDNSVVMRNNPYDEKSGESSQSIRSTQKSMRRLIEKRKKRIRCVAQTMERYGILDYSETMKINDPKNNPIKNRWQLRAVDAWKRPLSPQELFAIFAHMAKHRGYKSIATEDLIYELELELGLNDPEKESEKKADERRQVYNALRHLEELRKKYGGETIAQTIHRAVEAGDLRSYRNHDDYEKMIRREDIEEEIEKVLLRQAELGALGLPEEQVSELIDELKACITDQEMPTIDESLFGKCTFYKDELAAPAYSYLYDLYRLYKKLADLNIDGYEVTQEDREKVIEWVEKKIAQGKNLKKITHKDLRKILGLAPEQKIFGVEDERIVKGKKEPRTFVPFFFLADIAKFKELFASIQKHPDALQIFRELAEILQRSKTPQEALDRLRALMAGKGIDTDDRELLELFKNKRSGTRELSHRYILEALPLFLEGYDEKEVQRILGFDDREDYSRYPKSLRHLHLREGNLFEKEENPINNHAVKSLASWALGLIADLSWRYGPFDEIILETTRDALPEKIRKEIDKAMREREKALDKIIGKYKKEFPSIDKRLARKIQLWERQKGLDLYSGKVINLSQLLDGSADIEHIVPQSLGGLSTDYNTIVTLKSVNAAKGNRLPGDWLAGNPDYRERIGMLSEKGLIDWKKRKNLLAQSLDEIYTENTHSKGIRATSYLEALVAQVLKRYYPFPDPELRKNGIGVRMIPGKVTSKTRSLLGIKSKSRETNFHHAEDALILSTLTRGWQNRLHRMLRDNYGKSEAELKELWKKYMPHIEGLTLADYIDEAFRRFMSKGEESLFYRDMFDTIRSISYWVDKKPLSASSHKETVYSSRHEVPTLRKNILEAFDSLNVIKDRHKLTTEEFMKRYDKEIRQKLWLHRIGNTNDESYRAVEERATQIAQILTRYQLMDAQNDKEIDEKFQQALKELITSPIEVTGKLLRKMRFVYDKLNAMQIDRGLVETDKNMLGIHISKGPNEKLIFRRMDVNNAHELQKERSGILCYLNEMLFIFNKKGLIHYGCLRSYLEKGQGSKYIALFNPRFPANPKAQPSKFTSDSKIKQVGIGSATGIIKAHLDLDGHVRSYEVFGTLPEGSIEWFKEESGYGRVEDDPHH

SEQ ID NO: 191 - protein, 1327 aa, Solobacterium moorei
MEGQMKNNGNNLQQGNYYLGLDVGTSSVGWAVTDTDYNVLKFRGKSMWGARLFDEASTAEERRTHRGNRRRLARRKYRLLLLEQLFEKEIRKIDDNFFVRLHESNLWADDKSKPSKFLLFNDTNFTDKDYLKKYPTIYHLRSDLIHNSTEHDIRLVFLALHHLIKYRGHFIYDNSANGDVKTLDEAVSDFEEYLNENDIEFNIENKKEFINVLSDKHLTKKEKKISLKKLYGDITDSENINISVLIEMLSGSSISLSNLFKDIEFDGKQNLSLDSDIEETLNDVVDILGDNIDLLIHAKEVYDIAVLTSSLGKHKYLCDAKVELFEKNKKDLMILKKYIKKNHPEDYKKIFSSPTEKKNYAAYSQTNSKNVCSQEEFCLFIKPYIRDMVKSENEDEVRIAKEVEDKSFLTKLKGTNNSVVPYQIHERELNQILKNIVAYLPFMNDEQEDISVVDKIKLIFKFKIPYYVGPLNTKSTRSWVYRSDEKIYPWNFSNVIDLDKTAHEFMNRLIGRCTYTNDPVLPMDSLLYSKYNVLNEINPIKVNGKAIPVEVKQAIYTDLFENSKKKVTRKSIYIYLLKNGYIEKEDIVSGIDIEIKSKLKSHHDFTQIVQENKCTPEEIERIIKGILVYSDDKSMLRRWLKNNIKGLSENDVKYLAKLNYKEWGRLSKTLLTDIYTINPEDGEACSILDIMWNTNATLMEILSNEKYQFKQNIENYKAENYDEKQNLHEELDDMYISPAARRSIWQALRIVDEIVDIKKSAPKKIFIEMAREKKSAMKKKRTESRKDTLLELYKSCKSQADGFYDEELFEKLSNESNSRLRRDQLYLYYTQMGRSMYTGKRIDFDKLINDKNTYDIDHIYPRSKIKDDSITNRVLVEKDINGEKTDIYPISEDIRQKMQPFWKILKEKGLINEEKYKRLTRNYELTDEELSSFVARQLVETQQSTKALATLLKKEYPSAKIVYSKAGNVSEFRNRKDKELPKFREINDLHHAKDAYLNIVVGNVYDTKFTEKFFNNIRNENYSLKRVFDFSVPGAWDAKGSTFNTIKKYMAKNNPIIAFAPYEVKGELFDQQIVPKGKGQFPIKQGKDIEKYGGYNKLSSAFLFAVEYKGKKARERSLETVYIKDVELYLQDPIKYCESVLGLKEPQIIKPKILMGSLFSINNKKLVVTGRSGKQYVCHHIYQLSINDEDSQYLKNIAKYLQEEPDGNIERQNILNITSVNNIKLFDVLCTKFNSNTYEIILNSLKNDVNEGREKFSELDILEQCNILLQLLKAFKCNRESSNLEKLNNKKQAGVIVIPHLFTKCSVFKVIHQSITGLFEKEMDLLK

SEQ ID NO: 192 - protein, 738 aa, Treponema phagedenis
MLQELFAKEIAKIDEGFFRRLDESAFYLEDKSLKQKYSLFNDDNFTDKDYYKKFPTIHHLIKALINDETHVDIRLLYLACHTIIKNRGHFLFEGKEFNTESRFDDAINELFSYLRQDMEIDFAFEDKIADIKEILENKKIGMRDKQNALNKKLSIAPKDKQKKEIIKLIVGASFNLKTLFNDEKYSSEKESYSFAKSNYEEKEAVLESLLGDGFGLILRAKAVYDSSVLSEILGNETYLSFAKVKIYDKHKEDLAKLKKVIKTYHADEFKKVFAEANIQGNYCSYVGSCKKNGKKVPIEKRADKDAFYDFLKKILKDEKAKNSDADYAFILNEIELKTFLPKQVSKKNANIPYQLRRMELEKIVNNAEKYFSFLSEKDEYGTVKEKIIQLLTFKRPYYIGIIQDTHKEKFPDRCWVVKKENAKNEKITPWNFYDHIDEDKTAEAFITSRTNKCTYLIGEDVLPRNSLLYMEYTVLNELNNLKVSVDGVNIFDVKLKKKIYEQVFKQRKEVSKKTIADFLKKEGICKKENDVVITGIDEKCTTSLKLYIDIKKIIGKRIEEEPTKNALEDIILWASIYDEGEGRKILEAKIQSVYPDVFTQDELNKILKLKISGWGRFSRKFLESIVASFPGFTDTINIITAMRETNFNLMELLGDAYGFSKGIEKFNSKFNDDKKVFSYDKLVKDLYLSPSVKRMLWRALVIVKEVKSIMGKDPKKYLLKWQEEKKLKREGLPPAMQV

SEQ ID NO: 193 - protein, 1377 aa, Streptococcus equinus
MEKTYSIGLDIGTNSVGWAVITDDYKVPAKKMKVLGNTDKKYIKKNLLGALLFDSGETAEATRLKRAARRRYTRRKNRLRYLQEIFAKEMAKVDESFFQRLEESFLTDDDKTFDSHPIFGNKAEEDTYHQEFPTIYHLRKHLADSPEKVDLRLVYLALAHMIKFRGHFLIEGQLNAENTDVQKIFADFVGVYDRTFDDSHLSEITVDAASILTEKISKSRRLENLIKQYPTEKKNTLFGNLVALALGLQPNFKTNFKLSEDAKLQFSKDTYDEDLEELLGKIGDDYADLFTAAKNLYDAILLSGILTVDDNSTKAPLSASMIKRYEEHHEDLEKLKTFIKVNNFDKYHEIFKDKSKNGYAGYIENGVKQDIFYKHLKSIISEKNGGQYFLDKIEREDFLRKQRTFDNGSIPYQIHLQEMRTILRRQGEYYPFLKENQAKIEKILTFRIPYYVGPLARKNSRFAWAKYHSDEPITPWNFDEVVDKEKSAEKFITRMTLNDLYLPEEKVLPKHSYVYETFAVYNELTKIKYVNEQGKSFFFDANMKQEIFDHVFKENRKVTKAKLLSYLNNEFEEFRINDLIGLDKDSKSFNASLGTYHDLKKILDKSFLDDKTNEQIIEDIVLTLTLFEDRDMIHERLQKYSDIFTSQQLKKLERRHYTGWGRLSYKLINGIRNKENNKTILDFLIDDGDANRNFMQLINDDSLSFKTTIQEAQVVGDVDDIEAVVHDLPGSPAIKKGILQSVKIVDELVKVMGHNPQNIVIEMARENQITGYGRNRSNQRLKRLQDSLKEFGSDILSKKKPSYVDSKVENSHLQNDRLFLYYIQNGKDMYTGEELDIDHLSDYDIDHIIPQAFIKDNSIDNRVLTSSAKNRGKSDDVPSIEIVRNRKSYWYKLYKSGLISKRKFDNLTKAERGGLTETDKAGFIKRQLVETRQITKHVAQILDARFNTKCDENDKVIRDVKVITLKSSLVSQFRKEFKFYKVREINDYHHAHDAYLNAVVGTALLKKYPKLAPEFVYGEYKKYDVRKLVAKSSDNHSELGKATAKYFFYSNLMNFFKTEVKYADGRVFERPDIETNADGEVVWNKQRDFNIVRKVLSYPQVNIVKKVEVQTGGFSKESILPKGDSDKLIPRKTKKLQWETQKYGGFDSPTVAYSVLVVADVEKGKTRKLKTVKELVGISIMERSSFEENPVSFLEKKGYHNVQEDKLIKLPKYSLFEFEGGRRRLLASATELQKGNEVVLPQYMVNLLYHSQHVNNSHKPEHLNYVKQHKDEFKDIFNLIISIARINILKPKVVDNLINEFTEYGQEDISSLSESFINLLKFISFGAPGAFKFLKLDVKQSNLRYKSTTEALSATLIHQSVTGLYETRIDLSKLGEE

SEQ ID NO: 194 - protein, 1128 aa, Streptococcus vestibularis
MSDLVLGLDIGIGSVGVGILNKVTGEIIHKNSRIFPAAQAENNVERRTNRQGRRLTRRKKHRRVRLNHLFEESGLITDFTKVSINLNPYQLRVKGLIDELSNEELFIALKNMVKHRGISYLDDASDDGNSSVGDYAQIVKENSKQLETKTPGQIQLERYQKYGQLRGDFTVEEDGKKHRLINVFPTSAYRSEALRILQTQKEFNPQITDEFINRYLEILTGKRKYYHGPGNEKSRTDYGRYTTKKDSENEYITLDNIFGILIGKCTFYPEEYRAAKASYTAQEFNLLNDLNNLTVPTETKKLSEEQKNQIINYVKNEKAMGPAKLFKYIAKLLSCDVADIKGYRIDKSDKAEIHTFEAYRKMKTLETIDFEKMSRDQLDKLAYVLTLNTEREGIQEALDHEFADGNFSQEQIDELVQFRKANSSIFGKGWHNFSVKLMMELIPELYATSEEQMTILTRLGKQKTTSSSNKTKYIDEKLLTEEIYNPVVAKSVRQAIKIVNAAIKEYGDFDNIVIEMARETNEDDEKKAIQKIQKANKDEKDAAMLKAANQYNGRAELPHSVFHGHKQLATKIRLWHQQGERCLYTGKTISIHDLINNPNQFEIDHILPLSITFDDSLANKVLVYATANQEKGQRTPYQALDSMDDAWSFRELKAFVRESKSLSNKKKEYLLTEEDISRFDVRKKFIERNLVDTRYASRVVLNALQEHFRAHKTDTKVSVVRGQFTSQLRRHWGIEKTRDTYHHHAVDALIIAASSQLNLWKKQKNTLVNYSENQLLDIETGELISDDEYKESVFKAPYQHFVDTLKSKEFEDSILFSYQVDSKFNRKISDATIYATRQAKVGKDKKDETYVLGKIKDIYSQTGYDAFIKIYQKDKSKFLMYRHDPQTFEKVIEPILENYPNKEMNEKGKEVPCNPFLKYKEEHGDYIRKYSKKGNGPEIKSLKYYDSKLGNHIDITPKDSNNKVVLQSVSPWRADVYFNKTTGKYEILGLKYADLQFEKGTGTYKISQEKYNVIKKKEGVDSDSEFKFTLYKNDLLLIKDTETKEQQLFRFLSRTKPNVKHYVELKPYDKQKFEGNESLINVLGAVAKGGQCQKGINKPNISIYKVRTDVLGNQHIIKNEGDKPKLDF

SEQ ID NO: 195 - protein, 1080 aa, Unknown
  Methylocystis sp. ATCC 49242
MRVLGLDGGIASIGWALIEIFEDHEPSDGRIIDTGAWMFDAPEEKSQTGTKLKSELRRIFRGQRRVIRRRRQRMNEVRRILHRHGLLSSDNRDALKQPGLDPWKIRAEGIDRLLSPIEFAVALGHIARHRGFKSNSKGAKTSDLDAESSRMKKAVGETREKLARFGSPAKLLVEDEGFVLRQTKLKSGALETVRRFRNRDGDYSRSLLRDDLAAEVRALFRAQARLQSTFAKVELEAEFTQAAFFQRPLQDSERLVGPCPFEPAEKRSPKRGYSFELFRFLSRLNHLTLREGSEERTLTVEELRTAAADFGGVAKFTFSTLRKRLALPDIAIFVGIKADDEKKLDVVARSGEAATGTARLRRVVIDALGELAWGALISAPERLDKITEIITFRSDLDRIRAGLIEAGFDTPLIEAIVRAAADGKLDAFTGVGHISAKAARNIIPGLMRGMTYDKACAAAGYDHTASRERDAFDVGMHGKEALKKILQEERISRELVGSPSARKALIEAVKQVKAIIEKYGVPDRIHVELARDVGKSIEERRDIHFGIEKRSRQKDKLRELFGKEVGHLPQDGERGKEELLRFELWNEQMGRCLYTDEYINPKQLVASDNSVQVDHILPWSRFGDDSYLNKTLCTAKANQDKKGRTPYEWFRADKPEAEWDAFVARVESIQFMKGLKKRNYKLKNAEEAAEKFRSRNLNDTRWTCRLLAEALKQLYPKGEKDKDGKERRRVFTRPGALTNRLRRAWSLQRRKKSEKGERIADDRHHALDAIIVAATTESLLIRATREVQDIERKGLHYDLTKNITQPWPGFADEALDAVEKVFVARAERRRARGKAHDATIRHIAVRDDEAKVYERKKVGDIKLGDLIRVKDAERNAPLIENLRKWIEAGSPRDNPPLSPKGDPVSKVRLVTKNKVNITLDTGNPERLATVDRGEMARVDVFRKANRKGKYEYYLVPIYPHEIATMETPPMRAVQGGGDDDKWPEIDSTFEFLWSINQLSLLELTKPDGEVIRSYFRSLDRNTGALTVSGIANSTATRKGIGTRTLIDFKKLHVDRLGQIFEVERELRTWRGETWRGKDCI

SEQ ID NO: 196 - protein, 1087 aa, Phascolarctobacterium succinatutens
MLRMKYAIGLDIGIASVGYAVLALDHEENPWGIIRLGSRIFDVAENPKDGASLALPRREARSVRRRLRRHHHRLERIKNLLINTEFITKDELLHLYDGNLSDVYELRVKALDYSVTNAELTRILLHLAQRRGFKSNRKSDANDKEAGQLLEAVSANAKRMQENHYRTVGEMFYKDDLFSKYKRNKGGTYLTTVHRDMIAAEARTILEKQFALGNNICTQDFIDKYLSILLSQRQFDEGPGEPSPYAGNQIANMIGKCTFEPNEYRAAKASYSFERFNLLQKVNHLRLLLEGKSIALDNEQRKKIIALAHDKADLRYSHIRKALGLDEKVLFNTITYNDDVSVIEKKTKFNFLQAYHQIKKVLAEDMQKLTTEQLDNIGQILSTYKSDNKRTEELSALGLEKKIIDALLGINGLSKFAHLSLKALRKINPYLEEGKIYNEACTAAGYDFKAHANTQKTELLPAYKEEMDDITSPVARRAIAQSIKVINAIIREQKGSPLYINIELAREMAKGFDERTQIDKANKENQAKNERIMERIRTEFHKANPTGMDLIKLKLWEEQDGRSPYSQKAISINRLFEPGYVDIDHIVPYSISFDDSFKNKVLVFSDENRDKGNRLPIAYLQSKFGAKAAENFMIWVQSNIKDYKKRQKLLKREITEEDINKFKERNLQDTKTISRFLYNYINDYLLFAPSDTGKKKRVTAVNGTITAYLRKRWGINKIRANGDKHHAVDAVVIACTTDKMIKDLSSFSRYHELEYTHTDTESFLVNSLTGEILKRFPYPWEDFRPELMARLSDNPADALRKLNLIFYHGIDLSTIKPIFVSRMPRHKVTGAAHKATIKSARCLDNGIVICKTSLQNLKLDKEGEIANYYAPESDTILYNALKERLRSYDNKPAKAFAEPFYKPKADGTPGPLVKKVKVYEKSTLNVAVQQNTAVADNDSMVRVDVFHVKGNGYYLVPIYIADTLKKELPNKAIVAYKPYADWPVMDDSNFIFSLYPNDLIKFEHKNSVKFAKVNKESTLNDFYSTKSEIVYFKGCNINTGAITIINHENTYVVSSLGVKTLPSLEKYQADVLGNYTKVKKEVRKPFR

SEQ ID NO: 197 - protein, 1375 aa, Lactobacillus ruminis
MRKNQEPYNIGLDIGTSSIGWSIMNDNFDLMRVKGKKGIGVRLYNEGQSAAERRMHRTARRRYGRRKWRLRLLEDFFDEHMAEVDDTFFARLKDSNISPKDDKKYRKSLLFPKSKGVTYQDDGEFYKKYPTMYHLRYALMTEHRKFDLREIYLAFHHMVKYRGNFLYDTSVDSFEAKNLDIKGKFDEINDLLSSYTDFYVDNSNAALVESILLEKNTTRKDKSKKIAKLLHVEDKEKGKNKKAKDLATQISNAVLGLKCNFHLIFELQQKYSFDLCSEKTEENIAKLSEVLDENQKMLLMILKEVQDQVMLNAFVPSGMSLSEAMMQKYDDYGEQLKIYHELEHSVSDDSAAKLRGAYRDYNDNIIKRIDGDNKKDTFYKRVKNILTKISKEYVDQDVLESCGKLKKLIDENKLFIRQRTAANGVLPHQLHQIEMRKIIDNQKEYYPWLAEPNPNEKRRVYSKYKVEELIAFRIPYYVGPLVDPNNADKNKEARFSWMVRKKDGEITPWNFYDKVDWAESANNFIERMKSKDTYLLGEDVVPKESMLYQKYEVLNELNNLRINDSGLSDSFEDVKLKQAIYNDLFKKQKIVKITDLQNYLVQNHKYLVKPKISGLADENRFLSSLSTYSDLKTIFGDKVDDRTYFNDFEKMVEYSTVFEDGHDYNQKLDEYTWLTKEEKYKIGKKRYRGWGKLSKKLLTGLRDKNNHTIMDNLWETNRNFMQIQTADEFSKQIAEENERHLKGSVSDAINDMYTSPANKKAIRQVLRVVDDIQKAMGYAPSSISLEFAREDGPSVRTVSRANRMKSIYEKYASEVSEEVMKDLDGVIKDKKGLNDRLYLYFEQQGKDMYSGHPLDFDKVISGQEYDIDHILPQAVIKDDSLDNRVLTTKALNNDVKSKGVPCRMFNGMHSFWKNLYDKGFISRRKFNNLTTNPENIDKYKMKGFVNRQLVETRQIIKLVANVLNDKYQNDDVDIIEVRAELTHDVRKHFKFYKNRNVNDYHHAFDAYLTSFIGHYLFKKYPNLRPLFDYNDFMKVSDNVFKQLRGNNFLGEFLNKTGDIISTDGNFVLNKEEMINKLNKAYAFKKILVTKEVGQRTGAMFNETRYPAPNSRKAALKYRRMPKPDSLISVKDYKNTDIYGGYSGKNDAYMVIVDMGKQYMVVGVPVRYTEKLDKLRIKHSELYRDELRKVLSRDKTLLDSKGNVKRFDIVLDRVLYGQLIEDGNELFTLGSSKYKRNFRQLFLDKQCIEILDSSATPQPTDEELIWVYDQILDKVDKYFELYDINRQRETLRKGRAAFCSLPNISMKKDDVTKKKILNEILVALHANESESNCEKIGKKVFGRLQVPGGIKLSKEAKLIYQSPTGLFERVVYLKDL

SEQ ID NO: 198 - protein, 1391 aa, Prevotella oralis
MKKILGLDLGTTSIGWALVNEKENNEELSSIIRLGVRVNPLTVDEKSNFEKGKDITTNADRTKCRSARRNLQRFKLRREALADCLKRHGLMTDETPLCETNNSIIFKTYSNRAKAVCEKIALDDFVRVLFMINKKRGYKSSRKLNTDDEGTLVDGMDVAKLLYNEQITPGEYLLRLFKKGKKTRPDFYLSDLKAELERIWDFQRTFYPEILCNALKEDLKGKSRTQSSAIFYAKYKVSTAKIAGKDKRLQELTWRTDALRKQLTIDEVAYVICSINGEVNGSSQRLSMISDRSKLLYFNHQTIGQYLMQRLEENPNAGLKNIIFYRQDYEDEFNDIWNSQATYHKELTPELKKEVKDIIFYQRGLKSCKWLINYCELEHEEIEVKTPEGKLRKITIGSKTCPKSSPLFQEFKIWQVLNNLQVSPLNSRRKAKRKKDEEPSLFSDEDMNTACRYLNEEEKLTLFKELSIKKELKKKDALKLLFENYKELDLNYKVISGNVTMANLYRAFQDIISLTGNGEFDFQAMPAEEAEKTVEEIFGGLGYKTAFLHFDASLHDKEFERQPAYRLWHLLYSYAGDQSKTGIEALVKRIQELCGFEPEYARILANISFIPDYGNLSSKAMRKILPYMQDGYEYSEACSKAGYRHSASSLTKEEINKKNYKTHLDEIKRNSLRNPIVEKILNQMVNVVNSVIDTYSNIDEIRIEMARELKKSKPEREDMSFAISKATKETERIKGILEQEFKIQHVTRNDIIRYRLYEELKPNGYKTLYSNTYIPREDLFSKKFDIEHIIPKARLFDDSYSNKTLELRDINIEKGNQTAYDFVLSKYGEEGLYKYEQRVEEFKKNNEQAGTKCRKLLMREADIPSDFLNRDLNDSQYIAKKAHELLREIVPTVTATTGSITNRLREDWKLVNVMKELNWEKYDKLGLTEEYKDKDGNTVRHIKDWTKRNDHRHHAMDALTIAFTKPSFIQYLNNLNARSNRGGSIYGIEQKELERENNKLVFIPPIDPKIFRKQAKEHLSNILISIKAKNKVVTKNVNKTKSKSGTNRKVQLTPRGQLHLETVYGKIRTYKTEEIKVGTKLTEELIAKVADKKIREALMQRLSEYGGNIKKAFQNISKHPIWLNGSHTKHVPEKVKIVFFEDVFTIRKAITPDIKIDKVIDSKIRRILQERLNEFGGEASKAFSNLDENPIWFNRDKGIAIKSVKIRGIAKGTAIRVKKDIHGKTIIGNNGYPVANDYVNTGNNHHVAIFRDKDGNLQEHIVSFYEATARAIQNLPIVDRNYNSEKDWKFLFSMKQNEYFVFPNPNTGFNPSEISLKDEKNYALISPNLFRVQKLSHYYYVFRHHLETNVDTNLQLKDITWKRITAVNNLTGAVKVRIDHLGRIVDVGEYK

SEQ ID NO: 199 - protein, 1167 aa, Streptococcus sanguinis
MLFGLKTKFKDCFELEEEPDLNFSKENYDDNLEKLLGELGEDFSDVFDKLKILRDTILLSGMLTYTGATHARFSATMVERYEEHRKDLQRFKSFIKQNLSEQDYLDIFGRKTQNGFDVDKETKGYVGYITNKMVLTNPQKQKTIQQNFYDYISGKITGIEGSEYFLNKISDRTFLRKLRTSDNGAIPNQIHAYELEKIIERQGKDYPFLLENKDKLLSILTFKIPYYVGPLAKGNNSRFAWIKRANSSDILDDNDEDTRNGKIRPWNYHKLINMDETRDAFITNLIGNDTILLNEKVLPKRSLIYEEVMLQNELTRVKYKDKYGKAHFFDSEHRQNIINGLFKINSKRVNAERLIKYLSDNHKDLNAIEIVSGVEKGKSFNSTLKTYNDFKTIFSEEFLDSEIYQKELEEIIKVITVFDDKKSIKNYLTKYFGHLEFLDEEKINQLSKLRYTGWGRYSAKLLLDIRDEDTGFNLLQFLRNDEENRNLTNLISDNTLSFDPKIKAIQSKSTVEDDVFDEIKKLAGSPAIKRGILNSIKIVDELVQIIGYPPQNIVIEMARENMTTEEGQKKTKTRKSKLESALKNIENSVLENGKVLHSDEQLQSEKLYLYYLQNGKDIYSLDETGSPAPIYLDQLDQYEVDHIIPYSFLPIDSIDNKVLTHRKNNQRKLDNIPDKETVAHMKPFWEALYNAKLISQTKYQRLTTSERTPDGVLTESMKAGFIERQLVETRQIIKHVARILDNRFSDTKIITLKSQLVTNFRNTFHIAKIRELNDYHHAHDAYLAVVVGQTLLKAYPKLAPELIYGHHVHFNRHEENKATLRKHLYSNIMRFFNNPDSKVSKDIWDCNRDLPIIKHVIYNSQINFVKRTMIKKGAFYNQNPVGKFNKQLAANNRYPLKTKALCLDTSIYGGYGPMNSTLSIIIIAERFNEKKGKIETVKEFHDIFIIDYEKFNNNPFQFLNDTSENGFLKKNNINRVLGFYRIPKYSLMQKIDGTRMLFESKLNLHKATQFKLTKTQNELFFHMKRLLTNSNLMDLKSESAIKESQNFILKHKEEFDNISNQLSAFSQKMLGNTTSLKNLIKGYNERKIKEIDIREETIKYFYDNFIKMFSFVKSGAPKDINDFFDNKYTVARMRPKPDKRLLNATLIHQSITGLYETRIDLSKLGED

SEQ ID NO: 200 - protein, 1334 aa, Staphylococcus pseudintermedius
MGRKPYILSLDIGTGSVGYACMDKGFNVLKYHDKDALGVYLFDGALTAQERRQFRTSRRRKNRRIKRLGLLQELLAPLVQNPNFYQFQRQFAWKNDNMDFKNKSLSEVLSFLGYESKKYPTIYHLQEALLLKDEKFDPELIYMALYHLVKYRGHFLFDHLKIENLTNNDNMHDFVELIETYENLNNIKLNLDYEKTKVIYEILKDNEMTKNDRAKRVKNMEKKLEQFSIMLLGLKFNEGKLFNHADNAEELKGANQSHTFADNYEENLTPFLTVEQSEFIERANKIYLSLTLQDILKGKKSMAMSKVAAYDKFRNELKQVKDIVYKADSTRTQFKKIFVSSKKSLKQYDATPNDQTFSSLCLFDQYLIRPKKQYSLLIKELKKIIPQDSELYFEAENDTLLKVLNTTDNASIPMQINLYEAETILRNQQKYHAEITDEMIEKVLSLIQFRIPYYVGPLVNDHTASKFGWMERKSNESIKPWNFDEVVDRSKSATQFIRRMTNKCSYLINEDVLPKNSLLYQEMEVLNELNATQIRLQTDPKNRKYRMMPQIKLFAVEHIFKKYKTVSHSKFLEIMLNSNHRENFMNHGEKLSIFGTQDDKKFASKLSSYQDMTKIFGDIEGKRAQIEEIIQWITIFEDKKILVQKLKECYPELTSKQINQLKKLNYSGWGRLSEKLLTHAYQGHSIIELLRHSDENFMEILTNDVYGFQNFIKEENQVQSNKIQHQDIANLTTSPALKKGIWSTIKLVRELTSIFGEPEKIIMEFATEDQQKGKKQKSRKQLWDDNIKKNKLKSVDEYKYIIDVANKLNNEQLQQEKLWLYLSQNGKCMYSGQSIDLDALLSPNATKHYEVDHIFPRSFIKDDSIDNKVLVIKKMNQTKGDQVPLQFIQQPYERIAYWKSLNKAGLISDSKLHKLMKPEFTAMDKEGFIQRQLVETRQISVHVRDFLKEEYPNTKVIPMKAKMVSEFRKKFDIPKIRQMNDAHHAIDAYLNGVVYHGAQLAYPNVDLFDFNFKWEKVREKWKALGEFNTKQKSRELFFFKKLEKMEVSQGERLISKIKLDMNHFKINYSRKLANIPQQFYNQTAVSPKTAELKYESNKSNEVVYKGLTPYQTYVVAIKSVNKKGKEKMEYQMIDHYVFDFYKFQNGNEKELALYLAQRENKDEVLDAQIVYSLNKGDLLYINNHPCYFVSRKEVINAKQFELTVEQQLSLYNVMNNKETNVEKLLIEYDFIAEKVINEYHHYLNSKLKEKRVRTFFSESNQTHEDFIKALDELFKVVTASATRSDKIGSRKNSMTHRAFLGKGKDVKIAYTSISGLKTTKPKSLFKLAESRNEL

SEQ ID NO: 201 - protein, 1156 aa, Ruminococcus albus
MGNYYLGLDVGIGSIGWAVINIEKKRIEDFNVRIFKSGEIQEKNRNSRASQQCRRSRGLRRLYRRKSHRKLRLKNYLSIIGLTTSEKIDYYYETADNNVIQLRNKGLSEKLTPEEIAACLIHICNNRGYKDFYEVNVEDIEDPDERNEYKEEHDSIVLISNLMNEGGYCTPAEMICNCREFDEPNSVYRKFHNSAASKNHYLITRHMLVKEVDLILENQSKYYGILDDKTIAKIKDIIFAQRDFEIGPGKNERFRRFTGYLDSIGKCQFFKDQERGSRFTVIADIYAFVNVLSQYTYTNNRGESVFDTSFANDLINSALKNGSMDKRELKAIAKSYHIDISDKNSDTSLTKCFKYIKVVKPLFEKYGYDWDKLIENYTDTDNNVLNRIGIVLSQAQTPKRRREKLKALNIGLDDGLINELTKLKLSGTANVSYKYMQGSIEAFCEGDLYGKYQAKFNKEIPDIDENAKPQKLPPFKNEDDCEFFKNPVVFRSINETRKLINAIIDKYGYPAAVNIETADELNKTFEDRAIDTKRNNDNQKENDRIVKEIIECIKCDEVHARHLIEKYKLWEAQEGKCLYSGETITKEDMLRDKDKLFEVDHIVPYSLILDNTINNKALVYAEENQKKGQRTPLMYMNEAQAADYRVRVNTMFKSKKCSKKKYQYLMLPDLNDQELLGGWRSRNLNDTRYICKYLVNYLRKNLRFDRSYESSDEDDLKIRDHYRVFPVKSRFTSMFRRWWLNEKTWGRYDKAELKKLTYLDHAADAIIIANCRPEYVVLAGEKLKLNKMYHQAGKRITPEYEQSKKACIDNLYKLFRMDRRTAEKLLSGHGRLTPIIPNLSEEVDKRLWDKNIYEQFWKDDKDKKSCEELYRENVASLYKGDPKFASSLSMPVISLKPDHKYRGTITGEEAIRVKEIDGKLIKLKRKSISEITAESINSIYTDDKILIDSLKTIFEQADYKDVGDYLKKTNQHFFTTSSGKRVNKVTVIEKVPSRWLRKEIDDNNFSLLNDSSYYCIELYKDSKGDNNLQGIAMSDIVHDRKTKKLYLKPDFNYPDDYYTHVMYIFPGDYLRIKSTSKKSGEQLKFEGYFISVKNVNENSFRFISDNKPCAKDKRVSITKKDIVIKLAVDLMGKVQGENNGKGISCGEPLSLLKEKN

SEQ ID NO: 202 - protein, 1440 aa, Weeksella virosa
MKTILGLDLGTNSIGWALVEQDFENKQGLILGMGSRIIPMDAGIIGKFAEGSSISQTAERTGYRSIRRLRERHLLRRERLHRVLNILKFLPEHYAAEIDFEKRFGQFLAETEPKLAWKKNAEGKFEFLFQRSFDEMVADFKANGQDIKIPYDWTIYYLRKKALTQKISPQELAWIILNFNQKRGYYQLRGEEEEENPNKKVEFYSLKIVDVVADEQPNKKGDTWYSLHLENGWVYRRSSKIPLYDWKDKVRDFIVTTDINEDGSEKLDKDGEVKRSFRAPKEDDWTLIKKKTEQEIEQFNQTVGSYIYEALLDNPTQKIRGKLVRTIERKFYKSELKKILEKQIELQPELFTEDLYNACARELYRRNVAHQQQLSSRDFVYLFLNDIIFYQRPLRSQKSLISNCSLEFRTIKDKDGNGQIIYLKAIPKSNPYYQEFRVWQWLYNLKIFTKEDDKDVTNQFINKVEDLEALFEFLMNQKEVNHTDILTYLIEPIVKSKYPNAKGKAFKDELKKELKKYRWNYVYDADKDESKSYPMNETRYELRKRLDKVENVPADFMTRKIEQHLWHIIYSVTDKIEFEKALKSFANKYDLHQESFVENFKRFKPFDSDYGTYSEKAIKKLLPLMRVGKYWSWDIIDDKTKTRIGKIITGEYDETIKNRVREKAIDLTEENHFQGLQLWLAQYIVYDRHSEADIAGKWNSVADLEQYLSEFKQHSLRNPIVEQVITETLRVVRDIWKQYGKGAKDYFDEIHIELGREMKNTAEERKRLSSIISENETTNLRIRAILEELMYDENMENVRPYSPMQQEALKIYEDGVLSSSVEIPEDIEKISKKSEPTKSEIQRYKLWLEQKYRSPYTGRPIPLSKLFTPAYQIEHIIPQARFFDDGFSNKVICESEVNALKDKMLGLEFIQNYYGQKVTTSFGEVTILTEDAYKAFVKEHYDKNRSKRNKLLLEEIPEKMIDRQMNDTRYISKYISKVLSNLVRGEKDDEGVNSKNIIPGNGKITGILKQDWGLNDVWNDLILPRFERMNQLTNSTDFTAWNEKHQKFLPSVPLELSKGFQKKRIDHRHHALDALIIACATRDHVNLLNNKHAKSRNERYDLQHKLRHTTPWQDKEGKVRTKFTEFKKPWETFTQDTKKELEKIVVNFKQNLRVINKATNYYEKIVDGKKVMFKQEGVNWAIRKPMHKETVSGKIDLPRVKVSKGKILTATRKSLDTSFNAKTILSITDTGIQKILLNYLKAKGNPELAFSPEGIEEMNQNISLYNDGKPHQPILKVRVFEQGSKFPLGETGNKTTKYVEAAKGTNLFFGVYEDNQGKRSYDTIPLNIVIERQKQGLNSVPETNEKGHRLLFSLSPNDLVYVPIEGEVFDETNPDVNRIYKVVSFSGSQMFCVRQDVATSIVYKLEFSSLNKMERTIDGIMIKEICIKLKVDRLGNISKA

SEQ ID NO: 203 - protein, 1179 aa, Sphaerochaeta globus
MSKKVSRRYEEQAQEICQRLGSRPYSIGLDLGVGSIGVAVAAYDPIKKQPSDLVFVSSRIFIPSTGAAERRQKRGQRNSLRHRANRLKFLWKLLAERNLMLSYSEQDVPDPARLRFEDAVVRANPYELRLKGLNEQLTLSELGYALYHIANHRGSSSVRTFLDEEKSSDDKKLEEQQAMTEQLAKEKGISTFIEVLTAFNTNGLIGYRNSESVKSKGVPVPTRDIISNEIDVLLQTQKQFYQEILSDEYCDRIVSAILFENEKIVPEAGCCPYFPDEKKLPRCHFLNEERRLWEAINNARIKMPMQEGAAKRYQSASFSDEQRHILFHIARSGTDITPKLVQKEFPALKTSIIVLQGKEKAIQKIAGFRFRRLEEKSFWKRLSEEQKDDFFSAWTNTPDDKRLSKYLMKHLLLTENEVVDALKTVSLIGDYGPIGKTATQLLMKHLEDGLTYTEALERGMETGEFQELSVWEQQSLLPYYGQILTGSTQALMGKYWHSAFKEKRDSEGFFKPNTNSDEEKYGRIANPVVHQTLNELRKLMNELITILGAKPQEITVELARELKVGAEKREDIIKQQTKQEKEAVLAYSKYCEPNNLDKRYIERFRLLEDQAFVCPYCLEHISVADIAAGRADVDHIFPRDDTADNSYGNKVVAHRQCNDIKGKRTPYAAFSNTSAWGPIMHYLDETPGMWRKRRKFETNEEEYAKYLQSKGFVSRFESDNSYIAKAAKEYLRCLFNPNNVTAVGSLKGMETSILRKAWNLQGIDDLLGSRHWSKDADTSPTMRKNRDDNRHHGLDAIVALYCSRSLVQMINTMSEQGKRAVEIEAMIPIPGYASEPNLSFEAQRELFRKKILEFMDLHAFVSMKTDNDANGALLKDTVYSILGADTQGEDLVFVVKKKIKDIGVKIGDYEEVASAIRGRITDKQPKWYPMEMKDKIEQLQSKNEAALQKYKESLVQAAAVLEESNRKLIESGKKPIQLSEKTISKKALELVGGYYYLISNNKRTKTFVVKEPSNEVKGFAFDTGSNLCLDFYHDAQGKLCGEIIRKIQAMNPSYKPAYMKQGYSLYVRLYQGDVCELRASDLTEAESNLAKTTHVRLPNAKPGRTFVIIITFTEMGSGYQIYFSNLAKSKKGQDTSFTLTTIKNYDVRKVQLSSAGLVRYVSPLLVDKIEKDEVALCGE

SEQ ID NO: 204 - protein, 1370 aa, Streptococcus gallolyticus
MTKKNYSIGLDIGTNSVGWAVITDDYKVPAKKMKVLGNTDKKYIKKNLLGALLFDSGETAEATRLKRTARRRYTRRKNRLRYLQEIFAEEMTKVDESFFYRLDESFLTTDEKDFERHPIFGNKAEEDAYHQKFPTIYHLRNYLADSSEKADLRLVYLALAHMIKYRGHFLIEGKLNAENTDVQKLFTDFVGVYDRTFDDSHLSEITVDVASTLTEKISKSRRLENLIKYYPTEKKNTLFGNLIALALGLQPNFKMNFKLSEDAKLQFSKDTYEEDLEELLGKIGDDYADLFTSAKNLYDAILLSGILTVDDNSTKAPLSASMIKRYVEHHEDLEKLKEFIKANKSELYHDIFKDKNKNGYAGYIENGVKQDEFYKYLKNTLSKIDGSDYFLDKIEREDFLRKQRTFDNGSIPHQIHLQEMHAILRRQGDYYPFLKEKQDRIEKILTFRIPYYVGPLVRKDSRFAWAEYRSDEKITPWNFDKVIDKEKSAEKFITRMTLNDLYLPEEKVLPKHSHVYETYAVYNELTKIKYVNEQGKESFFDSNMKQEIFDHVFKENRKVTKEKLLNYLNKEFPEYRIKDLIGLDKENKSFNASLGTYHDLKKILDKAFLDDKVNEEVIEDIIKTLTLFEDKDMIHERLQKYSDIFTANQLKKLERRHYTGWGRLSYKLINGIRNKENNKTILDYLIDDGSANRNFMQLINDDTLPFKQIIQKSQVVGDVDDIEAVVHDLPGSPAIKKGILQSVKIVDELVKVMGDNPDNIVIEMARENQTTNRGRSQSQQRLKKLQSSLKELGSNILNEEKPSYIEDKVENSHLQNDQLFLYYIQNGKDMYTGDELDIDHLSDYDIDHIIPQAFIKDDSIDNRVLTSSAKNRGKSDDVPSLDIVRARKAEWVRLYKSGLISKRKFDNLTKAERGGLTEADKAGFIKRQLVETRQITKHVAQILDARFNTEHDENDKVIRDVKVITLKSNLVSQFRKDFEFYKVREINDYHHAHDAYLNAVVGTALLKKYPKLASEFVYGEYKKYDIRKFITNSSDKATAKYFFYSNLMNFFKTKVKYADGTVFERPIIETNADGEIAWNKQIDFEKVRKVLSYPQVNIVKKVETQTGGFSKESILPKGDSDKLIPRKTKKVYWDTKKYGGFDSPTVAYSVFVVADVEKGKAKKLKTVKELVGISIMERSFFEENPVEFLENKGYHNIREDKLIKLPKYSLFEFEGGRRRLLASASELQKGNEMVLPGYLVELLYHAHRADNFNSTEYLNYVSEHKKEFEKVLSCVEDFANLYVDVEKNLSKIRAVADSMDNFSIEEISNSFINLLTLTALGAPADFNFLGEKIPRKRYTSTKECLTATLIHQSITGLYETRIDLSKLGEE

SEQ ID NO: 205 - protein, 1044 aa, Unknown
  Nitrosomonas sp. AL212
MLHKMRYRLALDLGSTSLGWAMVRLNANQQPCAVIKAGVRIFSNGRNPKDGSSLAVTRREARSMRRRRDRLLKRKARMMRTLIEYGFFPANETQRKALENLNPYALRAKGLDEALTPSEFARALFHINQRRGFKSNRKTDKKDSDSGALKTAIKQLHSVLDPQGNDGKPRTVGELLYKRFTDLSKLPKDRTVRARYRQDKIVKDDGKTKIDKYYDLYIDRAMIEQEFDALWKKQSELNPILFTENARADLKDVLLYQRSLKPVKPGRCTFMSEEERAPLALPSTQRFRMYQEVNNLRILREGLKEESLTLQQRDDLINALEKNNRRTFTQIKKLLGVGGSVQFNFEDPKREELKGNTTSAILGKSEHFGEAWFAFNEAKQDAIVLQLIKEENEAKLVRWLQDETGIDEKRAEVIANAGLPEGYGSLCIEALARILPELRRDVVTYDKAVQAAGFEHHSKLNRNEEIPDITFKIESIDRNSGEIKQFHLHKELPYYGEYLQRHVGFGSGKPEDSIEKRYGKIANPTVHIGLNQVRVVVNALIKRYGHPSEIIVEVARDLKQSKDRRDEENKRQAENQKRNERLRKDIADILGISEERVRRDDIEKMILWEELSFDPADRRCPYSGVQVSTVMLLSDEVEVEHILPFSQTLDDSLNNKTVALRQANRIKGNRTPWEAFGTSNISGFDYSGILTRAELMPKAKRYRFAEDGYQRWLKDDAGFLARALNDTRHLSKIAREYMSLICPNTRVIPGQMTAMLRRNFGLNDVLGLNGEKNRNDHRHHAVDACVIAVTDQGLLQRFAAASASARERQLNRLVENMPLPWESYREHVRRAIDGIWVSHRPDHSHEGAMHNDTAYGLRGNGRVSFHKMVEGKREYIEDNLKVIEITDTKAIDRHGLLPTGKPRPYKGYKGDSNYCIEIVRNEKGRWEGEIISTFDAYQLVRKYGIVQLRYPVLSVSGKPLVMRLIRNDFVRLEHEGITRTLRVCKMREDGQVALADVTEANVDARTRTKEICYVFKTGGSLQKAKARRITISPIGELRDPGFKE

SEQ ID NO: 206 - protein, 1045 aa, Acidovorax avenae
MQKEKPLAYRLALDLGSTSLGWAVLRLSAPGEPSAVIRAGSRIFSDGRNPKDGSSLAVTRRAARAMRRRRDRLLKRKARMLAALERHGFFPQDEAARKALEKLNPYGLRARGLESALKPEEFGRALFHLNQRRGFQSNRKTDRKDSDSGALKQAIGTLRAQMHESGCRTVGEWFWKVRMERKPEGVKGQGVRARYRETPFTTDEGKKRIDKRYDLYVDRAMVAQEFDALWAAQATFAPALFNEAARAELRDILLHQRKLRPVQPGRCTLVPEEPRALLALPSTQRFRIYQEVNHLRVLHDELREEALTLAQRDQIVALLERQAKVTFTAMRKALGFSALFNLEDAKRDGLKGNATTAALGKKDLFGPLWAGFDTALQDEIVTQLMTEESEPRLIAWLQEHTGVDEARAQAIANAGLPEGYGSLGRTALARIVPELQRDVITYDKAVQAAGFAHHSDLGFSFEHDADEVERIGERTIASTGEIKPVFAFKQLPYYGRALQRHVAFAKENPRNDEERYGKIANPTVHIGLNQVRVVVNALMCRYGRPTEVVIELARDLKQSREQKLEAQQRQADNQKRNARIRRSIAEVLGISEERVRTLDIQKWILWEELSHDAADRRCPYSGVQISASMLLGERVEIEHILPFSMTLDDSLNNRTVALREANRIKRNRTPWDARTDFEAHGWSYDGILQRAERMPQRKRHRFAPDGYERWLGEDKDFLARALNDTRYLSRVAAEYLRLVCPGSATRVIPGQMTALLRGKFGLNDVLGLDGEKNRNDHRHHAVDACVIGVTDQRMMQRFAQANAQAREDGLTRLVEDMPLPWPTYRAHVERAVRHIWVSHKPDHGFEGAMMEETSYGILRDGTIKQRRKADGSAGREISRLIRITEPSQPQRHGVDAEGRPLPYKGYVGGSNYCLEITVNDKGKWEGQVISTFDAYRIVREGGLRQLRHSTQGQNGQALAMRLVIGDSVRLEVDEQERVMRIVKINGNNGQVFMAPVHEANVDARNSDKNEAFAYTSKIAGSFQKTKARQVTISPIGELRDPGFKG

SEQ ID NO: 207 - protein, 1218 aa, Prevotella denticola
MKASEEKLSKGLSTYMKENNLLTVGAAFAQLEDEGVRIRNNNNYRAIRSQFQHEIETIFMFQQGLSENELYERLVSEKKNIGTIFYKRPLRSQRGNVGKCTLERTKPRCAIGHPLFEKFRAWTLINNIKIRMSEEEQAEQLPMKLRFELYNDCFLAFVRAEFKFEDIRKYLEKRLGVHFSYNDKTINYKDSTSVAGCPITARFRKLLGEDWESFHVDGQKQRQAHGKNNASFHTVSYSTNDIWHFCYDAEEPEAVLSFAQDNLKWEKKKAEELVRIWSAIPQGYAMLSQKAIRNINKMLILGLKYSDAVLLAKVPEIVEITDGEILSVTEDYHRVEAQVGYEKQINNIVNALIAKYKSASEEYRFADHNYEYQLDKSDEKDIIKQIESNIGTRKWSLLDADEQTDILQKVRDKYQNFFRSHERKFVESPKLGECFEEYLMKKFPMVEGEQWKKLYHPSQIAIYRPVSAGKDRSALRLGNPDIGAIKNPTVLRVLNTLRKRVNQLLDDGLISPDETRVVVETARELNDANRKWALDNYNRIRHDENEKIKKILEEFYPKRDGISTDDIDKARYVIDQREMDYFTEEKPYNKDIKKYKLWLEQGGQCMYTGRTINLSNLFDPNSFDVEHTIPESISFDSSDMNLTLCDAHYNRFIKKNHIPADLPNYDKSVVIDGKEYSPIKPRLQRWADRVERLNRNVEYWRGQARRAQNKDRKDQCMREMHLWKMELEYWTKKLERFTITEVTDEFKNSQLVDTRVITRHAVLYLKSIFPHVDVQRGDVTAKFRKILGIQSVDEKKDRSLHSHHAIDATTLTIIPGAAKRERMLELFAKIEEVNKMLSFSGNEDRTGLKQELDGLKNQLNKEVKACRIGHNVSEIGTFINDNIIINHHVKNQALTPVRRRLRKRGHIVGGMDNPRWQTGDALRGEIHKASYYGAITQFAKDKDGKVLLKEGHPLVDPTIKFVIRRELKYKKSTADSGFASWDDLEKAIVDKELFALMKGQFPEETSFKDACEQGIYMIKKGKNGEVDTKLYRIRHIRCKTKQKNALKIKEQAYKSEKEYKRYFYAAVGDLYAMCCYTNGKTREFKIYSLYDISCHRKVGVEDIPEFITDKKGNRLMLDYKLHTGDMILLYKENPEELYDLDNVSLSKLLYKINGFENDGLRIRMVNHLVAKEAMGESVKDYAKLPDIIRCGVKTIKFLVMGENRDFVIKNGKISFNHR

SEQ ID NO: 208 - protein, 1458 aa, Fluviicola taffensis
MTKTILGLDLGTNSIGWALINQDFDNKKGEILGMGSRIIPMTQDIKDEFGKGNSISQTAERTRLRGVRRLIHRTLLRRERLHRVLNIIGFLPEHYANQIDFEKRFGKFKPESEPKISFDGNDVFLFEKSYQEMLVDFKIHQPQLVSNGKKIPHDWTIYYLRKKALSKKIEKEELAWILLNFNQKRGYYQLRGEEEEETPNKLVEFHSLKIVEVNADEPQKGKPEIWYSLVLENGWVYRRASKTPLFDWKDKIREFIVTTEINNDGTVKTDKEGTEKRSFRAPKPEDWTLQKKKTEFELSKSGNEVGAFIYESILQKPNQKIRGKLISTIERKFYKEELKTILKTQLFFHKELKDEKLYNACIEELYKNNEAHRSLLSNKGFEHLFINDILFYQRPLRSKKSQISNCPLEKRTYKKEGIEITEGIKVISKSNPIYQEFRLWQWISNLSLYCIEPTETNVTSTFLNSIEDYENLFEFLNNRKEIEQKHLLKYLLENQGFKGKLLTNELEKFRWNFVADKKYPCNETGSLLHTRLSKVKNISPDFLTKEIEHQLWHIIYSVTDKIEYEQALKTFARKNNLDVDSFFEHFKKIPPFESTYGAYSEKAIKKLLPLIRLGKYWNWEAIDSISKDRISKILSGEYDENIKNRVREKAVHLTSENNFQGLQEWLAKYIVYDRHSEGNDLGKWTSVSDLETYLKEFKQHSLRNPIVEQVITETLRVVKDIWIKHGKGTENFFDEIHVELGREMKNNSEDRKRLTNTITENENTNLRIKALLMEMMNDNDVENVRPYSPSQQEILKIYEDGALNSNIELDDEIVKISKKAEPTKSELQRYKLWLEQKYRSPYTGQVIPLNKLFTSEYEIEHVVPQSRFFDDSFSNKVICESAVNKRKDNQLGLQFIKNHSGEKVELGFGKVVQVFTEEQYLDFVKEHYSKNRSKHNKLLLEEIPEKMIERQLNDTRYISKFVSSILSNIVRSEKDDDGLNSKNILPGNGKITTELKRDWGLNDVWNDLILPRFERMNTITNSDLFTTYNDKYQKHLPTVPFEYSKGFQKKRIDHRHHAMDALVIACATRDHLNLMNNQSAKSELKRYDLQNKLRKKEPYFNQKENKQKEAFKDFIKPWGTFTEDSKNALEKIIISFKQNLRVINKATNSYESYKDEDGNLRIGKDGKPEKGLIKQKGLNWAIRKPLHKDTVSGQINLSRIKLPNGKILTATRKNLDTSFDLKTIENSITDTGIQKILKNYLLSKESPELAFSPEGLEEMNNEIEKYNNGKFHHPINKARIYELGSKFNVGQTGNRRDKFVEAAKGTNLFFAIYQDENKNRSYETIPLNEVIEHQKWRASLPKEEQEKIPLVPVNKLKGTFIFSLSPNDLVYVPSNDELERSASIDFSKLKKEQINRLYKMVSSSGSQCFFVKSEVATSVVNKMEYSSLNKMEKSIDNLMVKEICIKLKIDRLGNISKA

SEQ ID NO: 209 - protein, 1384 aa, Coriobacterium glomerans
MKLRGIEDDYSIGLDMGTSSVGWAVTDERGTLAHFKRKPTWGSRLFREAQTAAVARMPRGQRRRYVRRRWRLDLLQKLFEQQMEQADPDFFIRLRQSRLLRDDRAEEHADYRWPLFNDCKFTERDYYQRFPTIYHVRSWLMETDEQADIRLIYLALHNIVKHRGNFLREGQSLSAKSARPDEALNHLRETLRVWSSERGFECSIADNGSILAMLTHPDLSPSDRRKKIAPLFDVKSDDAAADKKLGIALAGAVIGLKTEFKNIFGDFPCEDSSIYLSNDEAVDAVRSACPDDCAELFDRLCEVYSAYVLQGLLSYAPGQTISANMVEKYRRYGEDLALLKKLVKIYAPDQYRMFFSGATYPGTGIYDAAQARGYTKYNLGPKKSEYKPSESMQYDDFRKAVEKLFAKTDARADERYRMMMDRFDKQQFLRRLKTSDNGSIYHQLHLEELKAIVENQGRFYPFLKRDADKLVSLVSFRIPYYVGPLSTRNARTDQHGENRFAWSERKPGMQDEPIFPWNWESIIDRSKSAEKFILRMTGMCTYLQQEPVLPKSSLLYEEFCVLNELNGAHWSIDGDDEHRFDAADREGIIEELFRRKRTVSYGDVAGWMERERNQIGAHVCGGQGEKGFESKLGSYIFFCKDVFKVERLEQSDYPMIERIILWNTLFEDRKILSQRLKEEYGSRLSAEQIKTICKKRFTGWGRLSEKFLTGITVQVDEDSVSIMDVLREGCPVSGKRGRAMVMMEILRDEELGFQKKVDDFNRAFFAENAQALGVNELPGSPAVRRSLNQSIRIVDEIASIAGKAPANIFIEVTRDEDPKKKGRRTKRRYNDLKDALEAFKKEDPELWRELCETAPNDMDERLSLYFMQRGKCLYSGRAIDIHQLSNAGIYEVDHIIPRTYVKDDSLENKALVYREENQRKTDMLLIDPEIRRRMSGYWRMLHEAKLIGDKKFRNLLRSRIDDKALKGFIARQLVETGQMVKLVRSLLEARYPETNIISVKASISHDLRTAAELVKCREANDFHHAHDAFLACRVGLFIQKRHPCVYENPIGLSQVVRNYVRQQADIFKRCRTIPGSSGFIVNSFMTSGFDKETGEIFKDDWDAEAEVEGIRRSLNFRQCFISRMPFEDHGVFWDATIYSPRAKKTAALPLKQGLNPSRYGSFSREQFAYFFIYKARNPRKEQTLFEFAQVPVRLSAQIRQDENALERYARELAKDQGLEFIRIERSKILKNQLIEIDGDRLCITGKEEVRNACELAFAQDEMRVIRMLVSEKPVSRECVISLFNRILLHGDQASRRLSKQLKLALLSEAFSEASDNVQRNVVLGLIAIFNGSTNMVNLSDIGGSKFAGNVRIKYKKELASPKVNVHLIDQSVTGMFERRTKIGL

SEQ ID NO: 210 - protein, 1077 aa, Neisseria bacilliformis
MQQKPQRYILGLDLGIASVGWACVWADENEHPTGLLDCGVRTFERAEVPKTGDSLALARRQARSVRRLIRRRAHRLLRLRRLLKREGVLLSADFNENGLVRGLPIDAWALRVAGLDRKLSNKEWAAVLLHLVKHRGYLSQRKNETQSKDKELGRLLAGVNGNREALQNRSDEYRTAAELAVKKFAAENNGSLRNKGGDYSHTFDRKDLQRELHLLFERQRALDNPFTSSEMEAAVDELLMKQRSALQGEAVLKMLGRCTFEPSEYKAAKNTYSAERFVWLTKLNNLRIQYNGEERALSEAERRLLLDEPYQKAKLTYKQVRTILELPESAVFKGLRYGHGEDGLKAESGTLMEMKAYHAVRKALKDAGLEGEWENRIRNPELLDAIGTAFSLYKTDEDIRANLAAFRLSENVLEALLAGLNFDKFVHLSLKALAKILPLMEQGMRYDEACKEAYGDHYGAKEQEDHRLLPPFVADDIRNPVVFRTLTQARKIVNEIVRRYGSPLRVHIETGREVGKSFSDRKEIEKRQEENRKERERAAAHFKELFPNFAGEPKAQDILKLRLYEQQHGKCLYSGKEIDLRRLPEKGYVEIDHALPFSRTWDDSFNNKVLVLGKENQDKRNRTPYEYLDGKGNSGAWRAFAERVSGCRFPYAKKQRLLTQKLDEKTEQGFLERNLNDTRYVARFLCQFIEEKMHLEGAGKKRVFASNGQITALLRGFWGLKKVREENDRHHALDAVVVACSSVSMQQKITRHFRYREELEHIDRETGEVIHGFPQPWEFFRQEVMTRVFSDDPVSELAEKLDSRPEAVHEFVTPLFVSRAPHRKVTGQGHLETIRSAKRLDEKISVVKLPLTQLKTKDIERIVGYPNREPALYDALAARLAAFKDDPAKAFSEPFYKTGKDGKCGVLVKAVRVENVQKSGLLVRKDESGKMQGVADNATMVRVDVFGKNGKNYLVPVYAWQVEKGELPNRAVVAYADEEDWDEMDDSFEFKFSLYPNDLVEVVTKKDKFFGYYSGFNRATGAINIKEHDLSKSKVKNGVYEGIGVKTAQSFQKYQVDTLGKTIRLCKPEKRMGFKKK

SEQ ID NO: 211 - protein, 1029 aa, Alicycliphilus denitrificans; identical to SEQ ID NO: 188

SEQ ID NO: 212 - protein, 1122 aa, Streptococcus suis; identical to SEQ ID NO: 82

SEQ ID NO: 213 - protein, 1428 aa, Parasutterella excrementihominis
MGKTHIIGVGLDLGGTYTGTFITSHPSDEAEHRDHSSAFTVVNSEKLSFSSKSRTAVRHRVRSYKGFDLRRRLLLLVAEYQLLQKKQTLAPEERENLRIALSGYLKRRGYARTEAETDTSVLESLDPSVFSSAPSFTNFFNDSEPLNIQWEAIANSPETTKALNKELSGQKEADFKKYIKTSFPEYSAKEILANYVEGRRAILDASKYIANLQSLGHKHRSKYLSDILQDMKRDSRITRLSEAFGSTDNLWRIIGNISNLQERAVRWYFNDAKFEQGQEQLDAVKLKNVLVRALKYLRSDDKEWSASQKQIIQSLEQSGDVLDVLAGLDPDRTIPPYEDQNNRRPPEDQTLYLNPKALSSEYGEKWKSWANKFAGAYPLLTEDLTEILKNTDRKSRIKIRSDVLPDSDYRLAYILQRAFDRSIALDECSIRRTAEDFENGVVIKNEKLEDVLSGHQLEEFLEFANRYYQETAKAKNGLWFPENALLERADLHPPMKNKILNVIVGQALGVSPAEGTDFIEEIWNSKVKGRSTVRSICNAIENERKTYGPYFSEDYKFVKTALKEGKTEKELSKKFAAVIKVLKMVSEVVPFIGKELRLSDEAQSKFDNLYSLAQLYNLIETERNGFSKVSLAAHLENAWRMTMTDGSAQCCRLPADCVRPFDGFIRKAIDRNSWEVAKRIAEEVKKSVDFTNGTVKIPVAIEANSFNFTASLTDLKYIQLKEQKLKKKLEDIQRNEENQEKRWLSKEERIRADSHGICAYTGRPLDDVGEIDHIIPRSLTLKKSESIYNSEVNLIFVSAQGNQEKKNNIYLLSNLAKNYLAAVFGTSDLSQITNEIESTVLQLKAAGRLGYFDLLSEKERACARHALFLNSDSEARRAVIDVLGSRRKASVNGTQAWFVRSIFSKVRQALAAWTQETGNELIFDAISVPAADSSEMRKRFAEYRPEFRKPKVQPVASHSIDAMCIYLAACSDPFKTKRMGSQLAIYEPINFDNLFTGSCQVIQNTPRNFSDKTNIANSPIFKETIYAERFLDIIVSRGEIFIGYPSNMPFEEKPNRISIGGKDPFSILSVLGAYLDKAPSSEKEKLTIYRVVKNKAFELFSKVAGSKFTAEEDKAAKILEALHFVTVKQDVAATVSDLIKSKKELSKDSIENLAKQKGCLKKVEYSSKEFKFKGSLIIPAAVEWGKVLWNVFKENTAEELKDENALRKALEAAWPSSFGTRNLHSKAKRVFSLPVVATQSGAVRIRRKTAFGDFVYQSQDTNNLYSSFPVKNGKLDWSSPIIHPALQNRNLTAYGYRFVDHDRSISMSEFREVYNKDDLMRIELAQGTSSRRYLRVEMPGEKFLAWFGENSISLGSSFKFSVSEVFDNKIYTENAEFTKFLPKPREDNKHNGTIFFELVGPRVIFNYIVGGAASSLKEIFSEAGKERS

SEQ ID NO: 214 - protein, 1371 aa, Lactobacillus buchneri
MKVNNYHIGLDIGTSSIGWVAIGEDGKPLRIKGKTAIGARLFQEGNPAADRRMFRTTRRRLSRRKWRLKLLEEIFDPYITPVDSTFFARLKQSNLSPKDSRKEFKGSMLFPDLTDMQYHKDYPTIYHLRHALMTQDEKFDIRMVYLAIHHIVKYRGNFLNSTPVDSFKASKVNFVDQFKKLNELYTAINPEESFQINLANSEDIGHQFLDPSIRKFDKKKQIPKIVPVSVDDKATDKINGKIASEIINAILGYKSKLDVVVQCTPVDSKSWALKFDEEDIDAKLQKILPEMDENQQSIIAILQNLYSQVTLNQIVPNGMSLSESMIEKYNDHHDHLKLYKKIIDQLADPKKKAALKKAYSQYVGDDGKVIEQADFWSSVKKNLDDSDLSKQIMDLIDAEKFMPKQRTSQNGVIPHQLHQRELDEIIEHQSKYYPWLAEINPNKHDLHLAKYKIEELVAFRVPYYVGPMITPDDQAKSAETVFSWMERKGKEAGQITPWNFDEKVDRNASANRFIKRMTTKDTYLIGEDVLPDESLLYEKFKVLNELNMVRVNGKLLKVADKQAIFQDLFENYKHISVKKLQNYIKSKTGLPSDPEISGLSDPEYFNNSLGTYNDFKKLFGNKVDEPDLQDDFEKIVEWSTVFEDKRILREKLNEITWLSDQQKDVLESSRYQGWGRLSKKLLTGIVNDQGERIIDELWNTNKNFMQIQSDNDFAKRIHEANADQMKAVDVEDVLADAYTSPQNKKAIRQVVKVVDDIQKAMGGVAPKYISIEFTRSEDRNPRRTISRQRQLENTLKDTAKSLAKSINPELLSELDNAAKSKKGLTDRLYLYFTQLGKDIYTGKPINIDEISTYDIDHILPQAFVKDDSLNNRVLVSKAINNGKSDNVPVQLFGAKMGHFWKQLAEAGLISKRKLKNLQTDPDTISKYAMHGFIRRQLVETSQVIKLVANILGDKYRNDNTKIIEITARMNHQMRDEFGFIKNREINDYHHAFDAYLTAFLGRYLYHRYIKLRPYFVYGDFKKFKEDKVTMRNFNFLHDLTDDTQEKIADAETGEVIWDRENSIQQLKDVYHYKFMLISHEVYTLRGAMFNQTVYPASDAGKRKLIPIKADRPINVYGGYSGSADAYMAIVRIHNKKGDKYRVVGVPMRARDRLDAAKKVSDADCDRALKDVLTPQLTKTKKSRKTGEITQVVEDFEIVLGKVMYRQLMIDGDKKFMLGSSTYQYNAKQLVLSDQSVKTLASKGRLDPLQESMDYNNVYTEILDKVNQYFSLYDMNKFRHKLNLGFSKFISFPNHNVFDGNTKASSGKREILEEVLNGLHANPTFGNLKDIGITTPFGQLQQPNGILLSDEAKIRYQSPTGLFERTVSLKDL

SEQ ID NO: 215 - protein, 1090 aa, Unknown
  Sphingomonas sp. S17
MDWRLGLDLGANSLGWAALRLDRAGDPIGILAMGSRIFSDGRDPKSGASLAVDRRAARAMRRRRDRFKQRQAALLKYLIRDGLFPADQADRQRLADEDPYALRARALDEELSLFEIGRALFHLNQRRGFQSNRKADRGQDDEAGKIAVGVDRLNQQMEEQGARTLGEFLHQRRRAATDANHIPSVRTRLRPETGEGAKGDGYDFYPSRALIAEEFEEIWAAQAPHYPDTLTQQVHDRLYEIIFHQRPLRAPQVGQCTLVAGETRLPKAHPLFQKRRLLEEINALMIVRPGEIAQRLTPEERDTLYLKLKDKRTVSFATLRKTLKLDSAARFNKESENRTELKGDEVAAELGAKTRLGTRWQHLSGDQQWEVVHRLMALESQADEAAFRDWISQTYDLLPEQAAAVLGARLPQGHGRFGPTATTTLIDSLLHDRTEDGRVVVYSEAVQRSGLGHHSDLRHDRDDEDVTELPYYGVALERHIMPGTAEPTDPEEMRIGRLTNPTVHIGLNQLRHVVNRLIRAYGPPKEIAIELARELKLSEDEKKKRNSENRDNRLAAEGRSKKLEEIRQRDTGANRALLKLWEELNPGNVLDRRCIYTGEQISIDMLFSDRVEVDHILPFAQTLDDSNGNKLLCLREANREKRRRSPYEAWGHTDRWPDIAERASRLPKPKRWRFEPDAMQRFATEDGFLARHLVDTQYLGRLAREYLSWLYPGRGEGSGHVWVSPGRLTEMVRRKLGLNDLLPDHNFGGGADQPKNRLDHRHHAIDALVVAIVDRGMLQAIARASGQDGSEGRERIHIPAPWDGFRDDLRVAVNGIIVSHRPDHGTVAKAGLARGRDQTAGRLHNDTAYGLTGETDAKGNSIVVRRIPLSAIKKPADIARVRDPLLRNALAEFTKGLDGKAFEARIGRFHELGPLLYRGIRRVRVVETLTVIPIRDAEGRAYKGYKGDSNYRYDVWEMPDGKWRCQVVSMFDAHQSTEQARPHPAARKILSLQRNDILAIERTEGDRELVRVVKFSEKQFAVAPPHEGGSLKTRDGNADDPFRYLYPSPNTLKGWRARQVRIDELGRVLDPGFPARKSVRRTRPRAAPVD

SEQ ID NO: 216 - protein, 1000 aa, Kingella kingae
MARAQRRLISRRANRMNKLRRLLKQENVLQANDYDEKGLIIGLPNQAWELRAQGLDRKLEPKEWAAVLINLVKHRGYLSQRKNESQTADKELGALLSGMNHNHQLLQSQSNQYRTPAELAIKQFATQDGHIRNQRGAYTHTFNRLDLQNELNQLFDAQTRLGNPHVSGSLKTAINDLLMNQKAALSGDAILEMLGRCTFEPSEYKAAKNTYSAERFVWLGKLTNLRIQDNGLESALSREQRELLLNEPYNKTKLTYQQVRKLLRLPETAFFKGLRYGKDNAESATFMEMKSYHAIRKSLENKSLKSEWEKLKTQPKLLDLIGTAFSIYKTDDEIAGCLKNQLPENVIIALQEQLNFSNFMELSLKALEKLLPLMEQGLRYDEACTQIYGNRHEKIADKTEKFLPNIPADKLRNPVVLRTLTQARKVINAIIRRYGSPARVHIETGREVGKSFSDRDKLKKQQEENQEQRRRAIDEWKQFFPNAAHEPKAVDILKLRLYQLQQGKCLYSGLPIDVRRLPEKGYVEIDHALPFSRTWDDSFNNKILVLASENQNKGNQTPYEYLRGADNSESWRLFVENVQNCQFSPNKKQKIMAKQLDEKGFLERNLNDTRYVSRFLCQFISEHLHLTGKGKKRVFASNGQITALLRGRWGLSKNREENDRHHAVDAVVVACSTVAMQQKITQFVRYQKGNVFTGERIDKETGEVISIHFPTPWEHFREEVMIRVFDDNPLRTLPEKLPNRPEALHEYVMPLFVSRMPTRKMTGQGHKETIKSAKRLDEKISVLRVPLTQLKLNDLENMVNREREPALYEALKARLEQFKNDPAKAFAEPFFKQGGQQVKAVRVEIVQKSGMLLRKINGVADNGSMVRVDVFEKSGKFYLVPIYAWQVAEGILPNYAVVAHKDESDWILMDESYHFKFALYKNDLLEVQTKKGGIMGYFASLDRATGAITIREHDRDKKKCKDGEHRSIGVKMASSFKKLQVDELGKNIHETRSRKRPNIG

SEQ ID NO: 217 - protein, 1130 aa, Streptococcus pasteurianus
MTNGKILGLDIGIASVGVGIIEAKTGKVVHANSRLFSAANAENNAERRGFRGSRRLNRRKKHRVKRVRDLFEKYGIVTDFRNLNLNPYELRVKGLTEQLKNEELFAALRTISKRRGISYLDDAEDDSTGSTDYAKSIDENRRLLKNKTPGQIQLERLEKYGQLRGNFTVYDENGEAHRLINVFSTSDYEKEARKILETQADYNKKITAEFIDDYVEILTQKRKYYHGPGNEKSRTDYGRFRTDGTTLENIFGILIGKCNFYPDEYRASKASYTAQEYNFLNDLNNLKVSTETGKLSTEQKESLVEFAKNTATLGPAKLLKEIAKILDCKVDEIKGYREDDKGKPDLHTFEPYRKLKFNLESINIDDLSREVIDKLADILTLNTEREGIEDAIKRNLPNQFTEEQISEIIKVRKSQSTAFNKGWHSFSAKLMNELIPELYATSDEQMTILTRLEKFKVNKKSSKNTKTIDEKEVTDEIYNPVVAKSVRQTIKIINAAVKKYGDFDKIVIEMPRDKNADDEKKFIDKRNKENKKEKDDALKRAAYLYNSSDKLPDEVFHGNKQLETKIRLWYQQGERCLYSGKPISIQELVHNSNNFEIDHILPLSLSFDDSLANKVLVYAWTNQEKGQKTPYQVIDSMDAAWSFREMKDYVLKQKGLGKKKRDYLLTTENIDKIEVKKKFIERNLVDTRYASRVVLNSLQSALRELGKDTKVSVVRGQFTSQLRRKWKIDKSRETYHHHAVDALIIAASSQLKLWEKQDNPMFVDYGKNQVVDKQTGEILSVSDDEYKELVFQPPYQGFVNTISSKGFEDEILFSYQVDSKYNRKVSDATIYSTRKAKIGKDKKEETYVLGKIKDIYSQNGFDTFIKKYNKDKTQFLMYQKDSLTWENVIEVILRDYPTTKKSEDGKNDVKCNPFEEYRRENGLICKYSKKGKGTPIKSLKYYDKKLGNCIDITPEESRNKVILQSINPWRADVYFNPETLKYELMGLKYSDLSFEKGTGNYHISQEKYDAIKEKEGIGKKSEFKFTLYRNDLILIKDIASGEQEIYRFLSRTMPNVNHYVELKPYDKEKFDNVQELVEALGEADKVGRCIKGLNKPNISIYKVRTDVLGNKYFVKKKGDKPKLDFKNNKK

SEQ ID NO: 218 - protein, 1119 aa, Lactobacillus coryniformis
MGYRIGLDVGITSTGYAVLKTDKNGLPYKILTLDSVIYPRAENPQTGASLAEPRRIKRGLRRRTRRTKFRKQRTQQLFIHSGLLSKPEIEQILATPQAKYSVYELRVAGLDRRLTNSELFRVLYFFIGHRGFKSNRKAELNPENEADKKQMGQLLNSIEEIRKAIAEKGYRTVGELYLKDPKYNDHKRNKGYIDGYLSTPNRQMLVDEIKQILDKQRELGNEKLTDEFYATYLLGDENRAGIFQAQRDFDEGPGAGPYAGDQIKKMVGKDIFEPTEDRAAKATYTFQYFNLLQKMTSLNYQNTTGDTWHTLNGLDRQAIIDAVFAKAEKPTKTYKPTDFGELRKLLKLPDDARFNLVNYGSLQTQKEIETVEKKTRFVDFKAYHDLVKVLPEEMWQSRQLLDHIGTALTLYSSDKRRRRYFAEELNLPAELIEKLLPLNFSKFGHLSIKSMQNIIPYLEMGQVYSEATTNTGYDFRKKQISKDTIREEITNPVVRRAVTKTIKIVEQIIRRYGKPDGINIELARELGRNFKERGDIQKRQDKNRQTNDKIAAELTELGIPVNGQNIIRYKLHKEQNGVDPYTGDQIPFERAFSEGYEVDHIIPYSISWDDSYTNKVLTSAKCNREKGNRIPMVYLANNEQRLNALTNIADNIIRNSRKRQKLLKQKLSDEELKDWKQRNINDTRFITRVLYNYFRQAIEFNPELEKKQRVLPLNGEVTSKIRSRWGFLKVREDGDLHHAIDATVIAAITPKFIQQVTKYSQHQEVKNNQALWHDAEIKDAEYAAEAQRMDADLFNKIFNGFPLPWPEFLDELLARISDNPVEMMKSRSWNTYTPIEIAKLKPVFVVRLANHKISGPAHLDTIRSAKLFDEKGIVLSRVSITKLKINKKGQVATGDGIYDPENSNNGDKVVYSAIRQALEAHNGSGELAFPDGYLEYVDHGTKKLVRKVRVAKKVSLPVRLKNKAAADNGSMVRIDVFNTGKKFVFVPIYIKDTVEQVLPNKAIARGKSLWYQITESDQFCFSLYPGDMVHIESKTGIKPKYSNKENNTSVVPIKNFYGYFDGADIATASILVRAHDSSYTARSIGIAGLLKFEKYQVDYFGRYHKVHEKKRQLFVKRDE

SEQ ID NO: 219 - protein, 1126 aa, Lactobacillus farciminis
MADRISLGLDIGVASVGFSVLDIDKGKVIELGARLFSATVAAGNQDRRDMRGARRLLNRNKQRRQDTGKLFKKFGLIDDFDKGSFYDNFNQNLNPYELRVKGLTEQLTKEELAESLYQIVKHRGISYALKDADVDEGGTDYSVSLKINSQELAEKTPAQIQLQRLNDYGKVRGQVVIGDDPDNQKVLLNVFPTSAYEKEAKQIIATQQQFYPESLTDKFTEEYCQILTRKRDYFVGPGNEKSRTDYGIYKTDGRTLDNLFEELIGHDKIYPEELRASAASYTAQLFNVLNDLNNLRILNYEDGKLTKEDKEKIIAEIKNNTTTINMLNVIKKVAGCSKDDIKGFRVNEKDKPEISSMPVYRKIHKDLLKAGVDISDWPVEFIDELSFILTLNTENGEIRKQLNNRLAPKFDFLNADLIQLIIDNKDSFEIKTNNKWHRFSVKTMNKLIPEMMERPVEQMTLLNEMGLVKKDKKRFENNKYLPYKEIAKDIFNPVASKSVREALKIVNAVLKKYGHIDYLVVEMPRDKNLKEEQDNIKEFQNKNKKAKDAAFEAFVKSVGSEQRVKEALSKNRKLQMKMRLWYQQQEIDPYNGKTIDATDLINNPDKFEIDHIIPQSISFYDSINNKTLCFASMNQVKGQKTPYEFMLEGHGQSYDKFKATVMANKNFGKAKRANYLFEENVSDIETRKRFLSRNLVDTRYSSRVVLNSLQDFFREKSADTKVTVIRGKFTSNMRKHWHIDKTRETFHHHAIDASIIAATPFLRMWKKGGTIFPVKVGEESIDIETGEILDDKNFDKAMYEEPYSGFVSEIMNADDRIKFSHQVDKKMNRKVSDATIYSTRTGKLAKDKKDAEYIVAKVKDIYSVDGFKKFKKVYDKDKTKFLLYKYDPRTFSKLERIISDCPDKVEKVQTNGKVKAVDISPFEMYRRDHGMIKKYSKKGNGPAIKQLKYLDKKLGSHIDITPANANGKHVILQSLKPWRTDVYLNHETGEYEIMGIKYSDLKFNKNEGYGIKKDKYLEIKKVEEVSEKSEFMFSLYRKDRVKVQDMKTGESVELLFWSRNFSNKKYAELKPISQAENDKKLPVYGKGRLIKRLIPKNCKIWKVNTTILGDPYYLEKESDSPKDILD

SEQ ID NO: 220 - protein, 1380 aa, Unknown
  Eggerthella sp. YY7918
MNLRHVGNYNIGLDMGTASVGWAAIDEQGELLHFKGKPTWGSRLFDSANTAATARMPRGQRRRYIRRRWRLDLLQKFFSEEMAEKDPEFFIRLRQSSLWPEDREGGHTAYHWPLFNDSDFNEKEYYEKFPTIFHLRQWLMETDEKADIRLIYLAFHNIVKHRGNFLQENNDSLSAQNANMRESLESFCIALEEWCDEKELTCSCDPQKLEHLFKEVKYRSDIRDGFAALLGLACSGENEVDVKAMAKEMGKAIVGYKADFSKIFTECDKEGSSFRLSDDEGPEAFLDICPDDGIALFEAIQMVYSSFILTGMLTEKGLSLSKISAYNQYGQDLESLKALVKEYVPNEYSSFFRGPTYSGSTEYDPSKAQGYTRYNLGPSKKGSGAKPMAYEDFKKSVEQLFANTNAINDERYKEMMGRFAEEKFLRRLRTSDNGRIPFQLNLEEMTAIIINQGKYYPFLLEQQEKLESLVRFRIPYYVGPLTRINARLDSKGNACFAWSKRKDGMDSASIKPWNWDEVIDKHASAQAFIERMTGTCTYLRGEPVLPRCSLLYEEYCVLNELNGARWTQDGDKFIRFDYKDRSDIIEELFKKRRGRIQYAAVADWMKQERSHANVHVSGGQGENAFESRLSSYHFFCNDVFGVDELPGSYVDMVEEIILWSTLFEDRSILREEIQRKYGDVLNEEQIKTICKKRFSGWGRLSRKLLCSLKAQTDNGPKSIMDILQEGDQNNGRVGRAMVFQEILHDEQLGFEQKIEEENTQSMLEGENLLIEDLPGSPAIRRSINQAVRIVDEIVGIAGHAPDNIFIEVTREDDTKKKGKRTTTRYSNIQKALEALKEEGAEALRELKTYKHNELDKRLSLYFMQNGKSLYSGIPLDIRRLSEYQIDHIIPQSYIKDDSYENMALVLPGENQSKADNLLISQDIRIKMKATWTALHKAGLMGDKKYNNLMNSSISDAKMKGFINRQLVETSQSVKLTQMMLSQKYPGAKVRPIKASISSQLRDACDLVKCREANDYHHAHDAYLACQVGRFVLKRHSSMFDNPIGMTKVIRDFVKRQGQEFKRNGKLPAYASRSGFIVQSFMRSGFDAETGELLRDDWNAPFEIARIKRCLNYRDCYISRMPMEDSGAFWDATIYSPKAGKKGALPVKQGLPVEKYGSYSREQFAYFFVYKAYNPKKKAYRLEFEAVPVRVASAVETRENALEEYAKSVAKQAGLEFVEVARPKVYKYQLIELGEDRLYITGKREVRNASQLAFSLDEIDLLKRLAEGEETSSEERERLFDVLIEKYARYAPRLARQLSVDSMSATFETLNAEEQLGILLSLVEIANGKRNMIDLSSAGGSKNAGCMNPTFSSELSSPGSNFTFIDQSVTGMFERRQRLEL

SEQ ID NO: 221 - protein, 1430 aa, Capnocytophaga canimorsus
MKHILGLDLGTNSIGWAVVKEAQNDNEQSEIVDVGVRVNPLTTDEKTNFEKGKPISTNADRTLKRSARRNLQRYKLRRKELIELLKEHQLISTDTILTENGKGTTFQTLELRAKSAKEKISLEELARVFLTINKKRGYKSSRKAKNEDEGQLIDGMEIAKRLYEENLTTGQLSLQLLKEGKKSLPDYYRSDLQFELDKVWNFQKQFHSHILTDEFYAQLKGKGQRATSALFLAKYQIYTAENKGSREDKKLQAYQWRVDALSKELTREQLAFVITEINNNLNNSSGYLGAISDRSKELYFNNETVGEYLWKQIAANPHTSLKNQVFYRQDYLDEFEQIWKTQSAFYPEILTDELKKELRDVVIFYQRKLKSQKSLVSFCEFENKEIEIKKEDGTSTKKVIGLKVAPKSSPLFQEFKIWQNLNNVLIRKKGSKTKKVDKNQQAVLFEEEKTIFELDLEAKQALFNELNLKGNLKAYYCLEILGYSPKEWEMNYSVLEGNRTNKALYEAYLKITDLEGYDAKNHLKVKLNKDEVELDDLKVPASEIKDMVQAIFKEAGINTDILHFNAELDGKDFENQASYQLWHLLYSYEGDDSKSGNELLYKLLETKFGFKKEYAQILANVSLSDDYGSLSTKAMRKIHPYIKENKFSTACELAGYRHSKHSLTKEENDNRVLKDSLEVLKKNSLRQPVVEKILNQMINLVNALLKKYRTENPNFKFDEIRIELARELKKNAEERANMTVNINKAKTEHEKIIKILKNEFGLPNPTRNDIIRYRLYEELKANGYKDLYTNEYIEKQDLFTKNIDIEHIIPKSRVFDDSFSNKTLSFRKTNLDKGERTAFDYIESKFGADKLEEYVARVEDLYKNNIISKAKYQKLLKKESEIGDGFVERDLRETQYIAKKAKEILLQITPNVLSTSGGITDRLREDWDLINVMKELNLPKYRALGLTQMEDRKYGQQVEVIIDWTKRNDHRHHAMDALTVAFTKHNHIQYLNYLNARKNEKHREHSNIMGIQQLETIKVTDKNGNEKRVFKAPMPNFRQVTKAFLENVLISHKAKNKVVTKNKNKVAGSNKVQEVLTPRGQLHKETVYGKYQYYVQKEEKIGGKFDLETIKKVANPLYQSLLKKRLEENGGDPKKAFTGKNSLAKNPIYLDDAQTEQLPEKVKLVWLENSFSIRKDITPENFKDEKLIDKILDEGVKRILKERLQSFGNDAKKAFSDLDKNPIWLNKEKGIAIKRVAISGVANAEPLHTKKDHLGKEILDKEGKSIPVDFISTGNNHHVAVYRDEKGNLQEKVVSVFEAVVRANQGLPIIDKTYNQHLGWEFLFTMKQNEMFVFSNESTGFNPNDIDLLDPKNKKIISPNLFRVQKFSKLQYGNSFVREFVFRHHLETTVEDRKELQGITYKQMKNSAFFNDIIKVRINHLGGIVSVGEY

SEQ ID NO: 222 - protein, 1348 aa, Finegoldia magna
MKSEKKYYIGLDVGTNSVGWAVTDEFYNILRAKGKDLWGVRLFEKAKTAADTRTFRSGRRRNDRKGVRLQILREIFEDEIKKVDKDFYDRLDESKFWAEDKKVSGKYSLFNDKNFSDKQYFEKFPTIFHLRKYLMEEHGKVDIRYYFLAINQMMKRRGHFLIDGQISHVTDDKPLKQQLILLINDLLKIELEEEFMDSIFEILADVNEKKTEKKNILKELINAQDFNKQEGKILYSIFESIVTGKAKIKNIISDEDILEKIKEDNKEDFVLTGDSYEENLQYFEEVLQENITLFNTLKSAYDFVILQSILKGKSTLSDAQVERYDEHKKDLEILKKVIKKYDEDGKLFKQVFKEDNGNGYVSYIGYYLNKNKKITAKKKISNIEFTKYVKGILEKQCDCEDEDVKYLLGKIEQENFLLKQISSINSVIPHQIHLFELDKILENLAKYYPSFNNKKEEFTKIEKIRKTFTFRIPYYVGPLNDYHKNNGGNAWIFRNKGEKIRPWNFEKIVDLHKSEEEFIKRMLNQCTYLPEETVLPKSSILYSEYMVLNELNNLRINGKPIDTDVKLKLIEELFKKKTKVTLKSIRDYMIRNNFADKEDFDNSEKNLEIVSNMKSYIDFNNILGDKFELEMVEDLIEKITIHTGNKKLLKKYIEETYPDLSSSQIQKIINLKYKDWGRLSRKLLDGITGTNIETGEIDTVINFLRNSSDNLMQIIGSQNYSFNNDIDKLRKKYIPQEISYEVVENLYVSPSVKKMIWQVIRITEEITKVMGYDPDKIFIEMAKSEEGKKTTISRKNKLLALYKAIKKDERDSQYEKLLTGLNKLDDSDLRSRKLYLYYTQMGRDMYTGEKIDLDKLFDSTHYDKDHIIPQSMKKDDSIINNLVLVNKNANQTTKGNIYPVPSSIRNNPKIYNYWKYLMEKEFISKEKYNRLIRNTPLTNEELGGFINRQLVETRQSTKAIKELFEKFYKKSKIIPVKAILASDLRKDMNTLKSREVNDLHHAHDAFLNIVAGDVWNREFTSNPINYVKENREGDKVKYSLSKYFTRPRKSKGKVIWTPEKGRKLIVDTLNKPSVLISNESHVKKGELFNATIAGKKDYKKGKIYLPLKKDDRLQDVSKYGGYKAINGAFFFLVEHTKSKKRIRSIELFPLHLLSKFYEDKNTVLDYAINVLQLQDPKIIIDKINYRTEIIIDNFSYLISTKSNDGSITVKPNEQMYWRVDEISNLKKIENKYKKDAILTEEDRKIMESYIDKIYQQFKAGKYKNRRTTDTIIEKYEIIDLDTLDNKQLYQLLVAFISLSYKTSNNAVDFTVIGLGTECGKPRITNLPDNTYLVYKSITGIYEKRIRIK

SEQ ID NO: 223 - protein, 1352 aa, Unknown
  Megasphaera sp. UPII 135-E
MKKRNREEYYVGLDIGTSSVGWAVATPDYRIPKFRGHKMWGSRLFAEGKRAAERRQFRTNRRRLARRRDRLQILEELFAEEMAKVDNTFFMRLKESKFFLEDKTVKEKHILFSTDKFDADRFYKDNPTIYHVRKRLMEEEPQDIRELFLAVHHILKYRGHFLFAGSLEQNGASIEELVRTLLGKQGLAILDDTIDSNEMVNILKNTGETKSDRKKDVQELWNPLKDKVKKAQAAEMAGLVLGLKSDISKLFANSDYKDLDSSIKNINFSSGDYEEKRDDYANSIGDDIVLLDTMKALYDTLILSQILQGKRSISAAKVEDYNTHKEQLRALKAILKPHKRLYNEMFRENNKKDLSNYVAYISSYSEGKRVNREGFYKYVQAVLKQVDDSDSKQAILEAIRLETFLPLLRVKDNAVIPHQIHQAELEAILETARKKYNFLNDVSDGVSVKDKIIQLFTFRIPYYVGPLNPHSGETVADRKQGTGWVVRKQRGKVYPWNFADMVDVKASAEAFITNLTNKCTYLIGEDVLPKRSLLYSEFMLLNELNMIKYDGHELPVAIKQLYIEQVFKQEHKKQTKGRVLDFLKRNGLITGSATAVITGMDDAIKGDLQSYRDMVRIFGAGFDHSMAERIIRWVTLFGEAKDILENKIREVYGNSISDSQMRAIKKLKYADWGRLSQAFLIAVKGCDKSGVERNIITCLRASSQNLMEILSDQGTYIKQIKAWNHQHTTNMMDTLDYQLVDDLYVAPSVKRSIWQSLCIVEELVKIMGQAPKKIFVEVTRTKQAEKTKKDSRKKRLVELYTAIGKEGAAWKKEIEAHQAGDFRRKKLYLYYTQMGRCMYSNEPIAMDALFTSAYDIDHIYPQSLTKDGSWDNLVLVKSQLNKEKSDQYPLRPAIREKNKAHWQYLCRAGFISEKKYERLMRTTELTAEELSGFIARQLVETSQATKAVTGLLERIYTNTEICFVKAETVSQFRHQHNFIKIRELNNYHHAKDAYLNIVVGNVYHEKFTKNPWEFIARSTERRPYNLNRMYDFDLLKQGRVIWQVPKSLETVQAMMKSNDVRITKKLLVQKGELYDATITKAHKAKEGTYFPLKGADARLRDVHRYGGYEKIKIAYYSVFSCREKASNTIHTLIIPIPVYKAGLLQTEADLTAYAWQTKQKTKPIKDIYSAITPIYKKLCINTVVKIDGFKYFLGGKTGDYMWLDPAIPVVLDEQAAAYLKAISKVGRADDVENTAQAIDLITAEANEAFYDVLLKKMEAKIFAKAYQTIVEKLASETARERFRELSIGAQCSCLLEILNLLANNKTTFTFFKDKMGVTMSRRKQPMDLTKLEECIVYETSITGLYEKAVSLL

SEQ ID NO: 224 - protein, 650 aa, Haemophilus pittmaniae
MENKNLHYILGLDLGIASVGWAVVEIDKEENPLCLIDVGVRTFERAEVPKTGESLALSRRLARSARRLTQRRVARLKKAKRLLKLENILLSTDERLPHQVWQLRVEGLDRKLKRQEWAAVLLHLIKHRGYLSQRKNESKSENKELGALLSGVASNHELLQQTTYRTPAELAVKKFEVEEGHIRNQQGAYTHTFSRLDLLAEMELLFSRQQHFGNPFASEKLLENLTALLMWQKPALSGEAILKMLGKCTFEDEYKAAKNTYTAERFVWITKLNNLRIQENGLERALNDNERLILIEQPYEKAKLTYAQVRSILNLSDEAIFKGLRYSGEDKKAIETKTTLMEMKAYHQIRKVLEGNNLKAEWTELKENSTLLDEIGTAFSLYKTDEDISTYLAGKLSQPVLNALLENLSFDKFIQLSLKALYKLLPLMQQGLRYDEACHEMYGDHYGKKTYGKKTEENHYFLPQIPADEIRNPVVLRTLTQARKVINGVVRLYGSPARIHIETGREVGKSYKDRRELEKRQEENRKQRENAIKEFKEYFPHFAGEPKAKDILKMRLYKQQNAKCLYSGKPIELHRLLEKGYVEVDHALPFSRTWDDSFNNKVLVLANENQNKGNLTPFEWLDGKHNSERWRAFKALVETSAFPYAKNNAS

SEQ ID NO: 225 - protein, 1062 aa, Ralstonia syzygii
MAEKQHRWGLDIGTNSIGWAVIALIEGRPAGLVATGSRIFSDGRNPKDGSSLAVERRGPRQMRRRRDRYLRRRDRFMQALINVGLMPGDAAARKALVTENPYVLRQRGLDQALTLPEFGRALFHLNQRRGFQSNRKTDRATAKESGKVKNAIAAFRAGMGNARTVGEALARRLEDGRPVRARMVGQGKDEHYELYIAREWIAQEFDALWASQQRFHAEVLADAARDRLRAILLFQRKLLPVPVGKCFLEPNQPRVAAALPSAQRFRLMQELNHLRVMTLADKRERPLSFQERNDLLAQLVARPKCGFDMLRKIVFGANKEAYRFTIESERRKELKGCDTAAKLAKVNALGTRWQALSLDEQDRLVCLLLDGENDAVLADALREHYGLTDAQIDTLLGLSFEDGHMRLGRSALLRVLDALESGRDEQGLPLSYDKAVVAAGYPAHTADLENGERDALPYYGELLWRYTQDAPTAKNDAERKFGKIANPTVHIGLNQLRKLVNALIQRYGKPAQIVVELARNLKAGLEEKERIKKQQTANLERNERIRQKLQDAGVPDNRENRLRMRLFEELGQGNGLGTPCIYSGRQISLQRLFSNDVQVDHILPFSKTLDDSFANKVLAQHDANRYKGNRGPFEAFGANRDGYAWDDIRARAAVLPRNKRNRFAETAMQDWLHNETDFLARQLTDTAYLSRVARQYLTAICSKDDVYVSPGRLTAMLRAKWGLNRVLDGVMEEQGRPAVKNRDDHRHHAIDAVVIGATDRAMLQQVATLAARAREQDAERLIGDMPTPWPNFLEDVRAAVARCVVSHKPDHGPEGGLHNDTAYGIVAGPFEDGRYRVRHRVSLFDLKPGDLSNVRCDAPLQAELEPIFEQDDARAREVALTALAERYRQRKVWLEELMSVLPIRPRGEDGKTLPDSAPYKAYKGDSNYCYELFINERGRWDGELISTFRANQAAYRRFRNDPARFRRYTAGGRPLLMRLCINDYIAVGTAAERTIFRVVKMSENKITLAEHFEGGTLKQRDADKDDPFKYLTKSPGALRDLGARRIFVDLIGRVLDPGIKGD

SEQ ID NO: 226 - protein, 1052 aa, Haemophilus parainfluenzae
MENKNLHYILGLDLGIASVGWAVVEIDEKENPLRLIDVGVRTFERAETQKGESLALSRRSARSARRLTQRRVARLKKAKRLLKSENILLSTDERLPHQVWQLRVEGLDRKLERQEWAAVLLHLIKHRGYLSQRKNESKSENKELGALLSGVASNHELLQQATYRTPAELAVKKFEVEEGHIRNQQGAYTHTFSRLDLLAEMELLFSRQQHFGNPFASEKLLENLTALLMWQKPALSGEDILKMLGKCTFEDEYKAAKNTYTAERFVWITKLNNLRIQENGLERALSDNERLMLIEQPYEKAKLTYAQVRSILNLSDDAIFKGVRYSGEDKKAIETKTTLMEMKAYHQIRKVLEGNNLKAEWVALKANPTLLDEIGTAFSLYKTDEDISAYLAGKLSQPVLNALLENLSFDKFIQLSLKALYKLLPLMQQGLRYDEACREIYGDHYGKKTEETHHFLPQIPADEIRNPVVLRTLTQARKVINGVVRLYGSPARIHIETGREVGKSYKDRHELKKRQEENRKQREKTISEIKTLFPNFSGEPKGKDILKMRLYYQQNAKCLYSGKPLELHRLFEQKYVEVDHALPLSRTWDDSFNNKVLVLANENQNKGNLTPFEWLDGKNNSERWRTFKALVETSAFPYAKKQRILSQKLDEKGFIERNLNDTRYVARFLCNFIADNMHLTGEGKRKVFASNGQITALLRRRWGLAKSREDNDRHHALDAVLVACSTVAMQQKITRFVRFKAGDVFTGERIDRETGEIIPLHFPTPWQFFKQEVEIRIFSDNPKLELENRLPDRPQANHEFVQPLFVSRMPTRKMTGQGHMETVKSAKRLNEGISMIKMPLTKLKLKDLELMVNREREKDLYDALKTRLEAFNDDPAKAFAEPFMKKGGAIVKSVRVEQVQKSGVLVRQGNGVADNASMVRVDVFTKDGKYFLVPIYTWQVAKGILPNKAVIQGKDEEDWEDIDDATFQFSLHPNDLISVKTKKDEFLGYFNGLNRHTGGINIRTHDLEKSKGKQGIFEGIGVKIALSFEKYQIDELGKNIRLCKPSKRQPVR

SEQ ID NO: 227 - protein, 1331 aa, Lactobacillus sanfranciscensis
MNKQPYNIGLDIGTSSVGWSATELDNRLLHIKGHNGIGVRLFKEGESAADRRGFRTTRRRLARRKWRLRLLNEIFATEIAKVDPSFFARLKQSNVSPKDPNKTMFENILFDDENLDDQKFHHDYKTIYHLRQAIINHPEQKFDIRLIYLAMHHIIKYRGHFLNQANVQDFKGGKIDLEKSFKALNDIFENQGRDLRLVTDKANQYVKVLSDNAKTRSDRKKELSKLLYVPIDKDTDKNSKKVTGEILKAILGNKAKFDVIFGIEVENPKEWVLTFNSDDFDDKIEGLSSQMTDEDSEILLILKELYFALNLSDILNNSVTDKNAKTLSEAMINRYDDHKNQLAMLKKVIDSSDKKHAKELKEAYSAYIDGENNKKISFEDLKKRIQKNLVDSELSQKINDLLDHDYFLPKQRSKENGAIPHQLQQQELDQIIESQKQYYPFLAELNPNEKRSRQAKYKLDELVAFRVPYYVGPMVEVTDSNQENNGKFAWMIRKEQGEITPWNFDEKVDRTETATKFITRMTTTDTYLIGEPVLPKNSLLYQKFVVLNELNNLKINQEIITPGQKQYLYEHVMKKNKRVTLKKIADALVIKGDYPYAPEVKGTTDQKNLNNGLTTYIDLAKIFGNELDDVDREADFEKIIEWSTIFEDQHIFALKLQELKWLTEKQRNQVVKLRYQGWGKLSKELLAGLVDDNGQRIIDLLWSDNQNFMQIVNQKSFKESIADHNGAHLEEKNLKDVINDLYTSPQNKKAIRQVILVVDDIINAVGYEPANIMMEFAREDSNDHRLTNSRSRQLENVYKDITNSWFDNDSVKDELEDKIKNKDKFTDRLYLYFTQGGKDLYTGEPLNIDDLSSYDIDHILPQSFILDNSLDNRVLTSQRNNRVSKEDQLPGELFGTKMHAFWKRLKAAHLISNKKYYNLTLTPNSISKFNNQGRFINRQLVETRQVIKLAAEILHNRYSEEKGTNIVTIKANLTHHMREKFNFYKNRNVNDYHHAFDAYLTAFVGNWLLQQYPKLKPYFVYGDFAKTEINNLKSFNMLYKFEQAHQLNEKDGKIAKDADALLGYMKNVYHFKKMLVTKKLETNHGALFKQTLYPSPAHDIKKRQLIKPKDNRPTDIYGGYTHEERKYMSLVKVIGKKDNEYRMANVPLLKINKNNDIKEILKSQFSNKKFEIVLPKVLKNQLFSENGALFVIGSKGYKYNANQLVLSDLDMKLLNDLSNNKSIDEVTINQLFKNIVDSTNKYMPLYEIKNLNEVVEKFNNLEFNDKKKTITDFLLATHANPTMSNLKNIGLPSYFGRFTSGNAGIKLSENANVIYQSPTGLFSRKVKISDF

SEQ ID NO: 228 - protein, 1473 aa, Flavobacterium branchiophilum
MAKILGLDLGTNSIGWAVVERENIDFSLIDKGVRIFSEGVKSEKGIESSRAAERTGYRSARKIKYRRKLRKYETLKVLSLNRMCPLSIEEVEEWKKSGFKDYPLNPEFLKWLSTDEESNVNPYFFRDRASKHKVSLFELGRAFYHIAQRRGFLSNRLDQSAEGILEEHCPKIEAIVEDLISIDEISTNITDYFFETGILDSNEKNGYAKDLDEGDKKLVSLYKSLLAILKKNESDFENCKSEIIERLNKKDVLGKVKGKIKDISQAMLDGNYKTLGQYFYSLYSKEKIRNQYTSREEHYLSEFITICKVQGIDQINEEEKINEKKFDGLAKDLYKAIFFQRPLKSQKGLIGKCSFEKSKSRCAISHPDFEEYRMWTYLNTIKIGTQSDKKLRFLTQDEKLKLVPKFYRKNDFNFDVLAKELIEKGSSFGFYKSSKKNDFFYWFNYKPTDTVAACQVAASLKNAIGEDWKTKSFKYQTINSNKEQVSRTVDYKDLWHLLTVATSDVYLYEFAIDKLGLDEKNAKAFSKTKLKKDFASLSLSAINKILPYLKEGLLYSHAVFVANIENIVDENIWKDEKQRDYIKTQISEIIENYTLEKSRFEIINGLLKEYKSENEDGKRVYYSKEAEQSFENDLKKKLVLFYKSNEIENKEQQETIFNELLPIFIQQLKDYEFIKIQRLDQKVLIFLKGKNETGQIFCTEEKGTAEEKEKKIKNRLKKLYHPSDIEKFKKKIIKDEFGNEKIVLGSPLTPSIKNPMAMRALHQLRKVLNALILEGQIDEKTIIHIEMARELNDANKRKGIQDYQNDNKKFREDAIKEIKKLYFEDCKKEVEPTEDDILRYQLWMEQNRSEIYEEGKNISICDIIGSNPAYDIEHTIPRSRSQDNSQMNKTLCSQRFNREVKKQSMPIELNNHLEILPRIAHWKEEADNLTREIEIISRSIKAAATKEIKDKKIRRRHYLTLKRDYLQGKYDRFIWEEPKVGFKNSQIPDTGIITKYAQAYLKSYFKKVESVKGGMVAEFRKIWGIQESFIDENGMKHYKVKDRSKHTHHTIDAITIACMTKEKYDVLAHAWTLEDQQNKKEARSIIEASKPWKTFKEDLLKIEEEILVSHYTPDNVKKQAKKIVRVRGKKQFVAEVERDVNGKAVPKKAASGKTIYKLDGEGKKLPRLQQGDTIRGSLHQDSIYGAIKNPLNTDEIKYVIRKDLESIKGSDVESIVDEVVKEKIKEAIANKVLLLSSNAQQKNKLVGTVWMNEEKRIAINKVRIYANSVKNPLHIKEHSLLSKSKHVHKQKVYGQNDENYAMAIYELDGKRDFELINIFNLAKLIKQGQGFYPLHKKKEIKGKIVFVPIEKRNKRDVVLKRGQQVVFYDKEVENPKDISEIVDFKGRIYIIEGLSIQRIVRPSGKVDEYGVIMLRYFKEARKADDIKQDNFKPDGVFKLGENKPTRKMNHNQFTAFVEGIDFKVLPSGKFEKI

SEQ ID NO: 229 - protein, 933 aa, Mycoplasma iowae
SVRDYSDGPGSEKSPTPYGLWRLNKEGKVEKIGENLWDVLVGKCTIYGNDDSIKDEKTKLRGGKNSPIAEVFNFINDLTNIYLFSSSKLKLNSKTKLSILDEFNISLKTSKPIKSFSEKKLVKHIISTTEFKDINFDDVYGYRIDTSKKPLFTKLENTITIAKWLLDNNVYNELNIYDQEDLIKINNIFVILQKSMDINKRAQLVSDEYKIDLPICLELVKKIKGVMQTHSFSYKAMLEYIPVGIKYNDLETGEDTSINASTYFVDKINNLNTKLLFNGRPRKYIPKNIFEDGIISPTSKRAFIQTINVLNKIIKVYSKDYDIDNIAIELPRDKNTAEERKKISSNQKKAGEEIAEVLKFAGLNVEEYTSKLNSKTKLKLKLLKEQNYKDIYDGQEIDVIDVIKNSNKYHEEHIIPYSLCFIDSRRNKVLTKFENNKQKGNKTPFQWLSSIGKYAEFKDRVEKLFVEQKISKAKKELLLFEQDPRTEMLGFIEKNLSDTRYASKLVFDTFRDFFKVNNPNVKIKVINGALTNYARYNLFATYKDGLLERKGIMKQREFYEHHGIDATILAFLGSNHKINQLLKLSHKFKKQDDNKIYDENTGELIEFTKDFLSDEARKKAMELSKQIFEIPCKFSRPIYRKSNVSFSNETLISMKWIDDKYTKGVKINKLSLVNKDLDLNEYFADYETNEMKNLICYQEDKTLYNKLKNIYDKYNNFVENSNIKPVKNPFINYMISNFSSDDSKIQNFKHIIFYDHKGNKKFVKSLKVCGDEKNLSNIVLRKDQKDIMNSKKIKKSGILESLNPISARIYKDNKGKYITIPINSLVLNWTKKGLEIDNEKLCNILKSKNIFNNQFIEINAGQSIINNENKLFYFVGGGDFKVNKLEIKSQFCDNEIFFPRKQMNISIATIIDNYKLCEVDELGKIYNIRKIVL

SEQ ID NO: 230 - protein, 1358 aa, Acidaminococcus intestini; identical to SEQ ID NO: 94

SEQ ID NO: 231 - protein, 983 aa, Campylobacter jejuni
MARILAFDIGISSIGWAFSENDELKDCGVRIFTKAENPKTGESLALPRRLARSARKRLARRKARLNHLKHLIANEFKLNYEDYQSFDESLAKAYKGSLISPYELRFRALNELLSKQDFARVILHIAKRRGYDDIKNSDDKEKGAILKAIKQNEEKLANYQSVGEYLYKEYFQKFKENSKEFTNVRNKKESYERCIAQSFLKDELKLIFKKQREFGFSFSKKFEEEVLSVAFYKRALKDFSHLVGNCSFFTDEKRAPKNSPLAFMFVALTRIINLLNNLKNTEGILYTKDDLNALLNEVLKNGTLTYKQTKKLLGLSDDYEFKGEKGTYFIEFKKYKEFIKALGEHNLSQDDLNEIAKDITLIKDEIKLKKALAKYDLNQNQIDSLSKLEFKDHLNISFKALKLVTPLMLEGKKYDEACNELNLKVAINEDKKDFLPAFNETYYKDEVTNPVVLRAIKEYRKVLNALLKKYGKVHKINIELAREVGKNHSQRAKIEKEQNENYKAKKDAELECEKLGLKINSKNILKLRLFKEQKEFCAYSGEKIKISDLQDEKMLEIDHIYPYSRSFDDSYMNKVLVFTKQNQEKLNQTPFEAFGNDSAKWQKIEVLAKNLPTKKQKRILDKNYKDKEQKNFKDRNLNDTRYIARLVLNYTKDYLDFLPLSDDENTKLNDTQKGSKVHVEAKSGMLTSALRHTWGFSAKDRNNHLHHAIDAVIIAYANNSIVKAFSDFKKEQESNSAELYAKKISELDYKNKRKFFEPFSGFRQKVLDKIDEIFVSKPERKKPSGALHEETFRKEEFYQSYGGKEGVLKALELGKIRKVNGKIVKNGDMFRVDIFKHKKTNKFYAVPIYTMDFALKVLPNKAVARSKKGEIKDWILMDENYEFCFSLYKDSLILIQTKDMQEPEFVYYNAFTSSTVSLIVSKHDNKFETLSKNQKILFKNANEKEVIAKSIGIQNLKVFEKYIVSALGEVTKAEFRQREDFKK

SEQ ID NO: 232 - protein, 1338 aa, Streptococcus macacae
MTKPYSIGLDIGTNSVGWAVVTDGYKVPAKKMKVLGNTDKSHIKKNLLGALLFDSGNTAKDRRLKRTARRRYTRRRNRILYLQEIFAEEMAKADESFFQRLNESFLTNDDKEFDSHPIFGNKAEEEAHHHKFPTIFHLRKHLADSTEKSDLRLIYLALAHMIKFRGHFLIEGQLKAENTNVQTLFDDFVEVYDKTVEESHLSEISVSSILTEKISKSRRLENLIKYYPTEKKNTLFGNLIALSLGLQPNFKTNFKLSEDAKLQFSKDTYEEDLGELLGKIGDNYADLFISAKNLYDAILLSGILTIDDNTTKAPLSASMIKRYEEHQEDLAQLKKFIRQNLPDQYSEVFSDKTKDGYAGYIDGKTNQEAFYKYIKNMLSKTEGADYFLDKIDREDFLRKQRTFDNGSVPHQIHLQEMHAILRRQGEYYPFLKENQDKIEKILTFRIPYYVGPLARKGSRFAWAEYKADKKVTPWNFDDILDKEKSAEEFITRMTLNDLYLPEEKVLPKHSLVYETFNVYNELTKVKYVNEQGKAIFFDANMKQEIFDHVFKENRKVTKDKLLNYLNKEFEEFRIVNLTGLDKENKAFNSSLGTYHDLRKILDKSFLDDKVNEKIIEDIIQTLTLFEDREMIRQRLQKYSDIFTTQQLKKLERRHYTGWGRLSAKLINGIRDKQSNKTILGYLIDDGYSNRNFMQLINDDSLPFKEEIARAQVIGETDDLNQLVSDIAGSPAIKKGILQSLKIVDELVKVMGHNPANIVIEMARENQTTAKGRRSSQQRYKRLEEAIKNLDHDLNHKILKEHPTDNQALQNDRLFLYYLQNGRDMYTEDPLDINRLSDYDIDHIIPQSFIKDDSIDNKVLVSSAKNRGKSDNVPSEDVVNRMRPFWNKLLSCGLISQRKYSNLTKKELKPDDKAGFIKRQLVETRQITKHVAQILDARFNTKRDENKKVIRDVKIITLKSNLVSQFRKDFKFYKVREINDYHHAHDAYLNAVIGKALLDVYPQLEPEFVYGEYPHFHGYKENKATAKKFFYSNIMNFFKKDDIRTDENGEIVWKKDEHISNIKRVLSYPQVNIVKKVEIQTVGQNGGLFDDNPKSPLEVTPSKLVPLKKELNPKKYGGYQKPTTAYPVLLITDTKQLIPISVMNKKQFEQNPVKFLRDRGYQQVGKNDFIKLPKYTLVDIGDGIKRLWASSKEIHKGNQLVVSKKSQILLYHAHHLDSDLSNDYLQNHNQQFDVLFNEIISFSKKCKLGKEHIQKIENVYSNKKNSASIEELAESFIKLLGFTQLGATSPFNFLGVKLNQKQYKGKKDYILPCTEGTLIRQSITGLYETRVDLSKIGED

SEQ ID NO: 233 - protein, 1265 aa, Mycoplasma ovipneumoniae
MHNKKNITIGFDLGIASIGWAIIDSTTSKILDWGTRTFEERKTANERRAFRSTRRNIRRKAYRNQRFINLILKYKDLFELKNISDIQRANKKDTENYEKIISFFTEIYKKCAAKHSNILEVKVKALDSKIEKLDLIWILHDYLENRGFFYDLEEENVADKYEGIEHPSILLYDFFKKNGFFKSNSSIPKDLGGYSFSNLQWVNEIKKLFEVQEINPEFSEKFLNLFTSVRDYAKGPGSEHSASEYGIFQKDEKGKVFKKYDNIWDKTIGKCSFFVEENRSPVNYPSYEIFNLLNQLINLSTDLKTTNKKIWQLSSNDRNELLDELLKVKEKAKIISISLKKNEIKKIILKDFGFEKSDIDDQDTIEGRKIIKEEPTTKLEVTKHLLATIYSHSSDSNWININNILEFLPYLDAICIILDREKSRGQDEVLKKLTEKNIFEVLKIDREKQLDFVKSIFSNTKFNFKKIGNFSLKAIREFLPKMFEQNKNSEYLKWKDEEIRRKWEEQKSKLGKTDKKTKYLNPRIFQDEIISPGTKNTFEQAVLVLNQIIKKYSKENIIDAIIIESPREKNDKKTIEEIKKRNKKGKGKTLEKLFQILNLENKGYKLSDLETKPAKLLDRLRFYHQQDGIDLYTLDKINIDQLINGSQKYEIEHIIPYSMSYDNSQANKILTEKAENLKKGKLIASEYIKRNGDEFYNKYYEKAKELFINKYKKNKKLDSYVDLDEDSAKNRFRFLTLQDYDEFQVEFLARNLNDTRYSTKLFYHALVEHFENNEFFTYIDENSSKHKVKISTIKGHVTKYFRAKPVQKNNGPNENLNNNKPEKIEKNRENNEHHAVDAAIVAIIGNKNPQIANLLTLADNKTDKKFLLHDENYKENIETGELVKIPKFEVDKLAKVEDLKKIIQEKYEEAKKHTAIKFSRKTRTILNGGLSDETLYGFKYDEKEDKYFKIIKKKLVTSKNEELKKYFENPFGKKADGKSEYTVLMAQSHLSEFNKLKEIFEKYNGFSNKTGNAFVEYMNDLALKEPTLKAEIESAKSVEKLLYYNFKPSDQFTYHDNINNKSFKRFYKNIRIIEYKSIPIKFKILSKHDGGKSFKDTLFSLYSLVYKVYENGKESYKSIPVTSQMRNFGIDEFDFLDENLYNKEKLDIYKSDFAKPIPVNCKPVFVLKKGSILKKKSLDIDDFKETKETEEGNYYFISTISKRFNRDTAYGLKPLKLSVVKPVAEPSTNPIFKEYIPIHLDELGNEYPVKIKEHTDDEKLMCTIK

SEQ ID NO: 234 - protein, 1535 aa, Flavobacterium columnare
MTKILGLDLGTNSIGWAIRDTENEGINQILDKGARIFSEGVKSENGKEISRAAERTAYRSARKIKYRRKLRKYETLKVLSINGMCPLSVEEVEQWKKSGFKEYPLNPEFLDWLRTNEDKNINPYLFRDKASKQKVTLFELGRALYHIAQRRGFLSNRLDQSAEGVFEEHNPQIQNLIEDLDSSNTILNELKEYYINLGIIDETEKSGFKKDLDEGEKKLKSLYNSLVAITKKNANDIETCKQELIARLNKKEDLGKVKGKIKDISQAMLDRNFKTLGQYFFSLYNKERIRNQYTSREEHYLEEFIIICQTQGIEGINTNEKLPEKKFTGLAKDLYRAIFFQRPLKSQKGLIGKCSFEKNKSRCAVSHPDYEEFRMWSYLNTIKIGTQSEKTLRFLTLEEKLKLVPKFYRKSDFNFEVLAKELVEKGASFGYYKSSKKNEFFYWFNYKPTDSVSACVVSASLENAIGKDWKIKTFEYQTRNTEKNEVTKSVDYKDLWHLLSVATSDTYLYDFAIEKLKLEPKNAKAFSKTKLKKDFASLSLAAIAKILPYLKQGLLYSHAVFMANIENIVDADIWKDEEQQKFIQSKIVELVDNYIVEKSKLELINGLLKIYNTEDKEGRKVYYSKEAESLFEADLRKKLVPFYKANIIIEEHEQEIIFQDLFPILMDQLKKQEFIKIGRLDKQIEAFLEGENEEGQIFCNHTDKLKKLYHPSDIEVFKKKTIKDEWGNEKVVLGSPLTTSIKNPMAMRALHQLRKVLNTLIANDQIDEDTRIHIEMARELNDANKRKGIQDFQNENKKFREEAIKEIKKLYLEECHKDVNPTEDDILRYQLWLEQGKCEIYEEGNNISICDIIGSNPSYDIEHTIPRSISQDNSQMNKTLCSLKFNRSIKKQKMPVELSNYNDILPRIAHWKKEAEELTRQIETISRSIKSAATKVAKDKNIRKRHYLTLKRDYILGKYERFTWEEPKVGFKNSQIPDTGIITKYAQAYLKSYFKRVESVKGGAVAEFRKLWGIQESFIDENWWKHYKDKDRDKHTHHTIDAITIACMPKDKYDLLAHAWRLEDEQDKKAAKVLIEQAKPWKTFKEDIEKIETEILVSHFTPDNVKKQSKSIIKNRGKKVYVLKNELPVNFKNKIEGKDYFKLKFDSKILYKIPKKKEKQTDTFYEELPKNYLNGVEGKDYFKINTTGKTFYKIPIFNQGDTIRGSLHQETTYGAIKLPDIDIETKKPLHTDKGGFILKKDIKGNEIVFFVVRKEISKISENDVQNIVDNVVRKKIENAIANSLITFKIVKKKKVAVIKEGVTIWMREPNIEKGIEGIPIKKVRIITNSVKNPIEIKVHSPLSKSRHKHKQKVYGQNDENYAMALYELDGKREFELINNFNLAKLLKQSQSYYPLHKEKEIKGKKILVPIEKRNNKDVILKRGQQVVFYDKTVENPKDISEIIDFRERIYIIEGLTIQRQKDKKTSKVNEYGIIQLRHFKEARKSEEISKDNFKPDGEFKINENKPTRKMNHNQFTAFVEGIDFKVLPSGKFQKI

SEQ ID NO: 235 - protein, 1459 aa, Flavobacterium columnare
MKFNLGLDIGTNSIGWALVNEDYENKKGKIIAAGSRIIPMTQDILDKFGSGAITETQTALRTDYRSKRKLIQRFLLRRERLHRVLNVLDFLPKHYAESIDFEKYFGKFLPNTEPKLAYNQNQFIFQNSFLEMLKEFQEKHPELLTNNKKIPYDWTIYYLRKKALNQRIEKEELAWLLLQFNQKRGYNQLRDEEEESVPNKQVEFYSLKIIDVVADQPKEGRDKRWYSINLENGWTYRRESKTPLFNWEGKTKDFIVTTDLNQDGSIKKDKEGKEKRSFRAPSEGDWTLLKKKTEKEIYESGKTLGTYIYDALLNTPDLKIKGDFIRTIDRSIYKEELQQIINKQKEYHLELNSSKLYKACLEELYPKNEIYKSALKNKDIAYLFINDILYYQRPLKAPKYNIGKCTYESRTFKKEDKKIREYIPAVAKSHPLFQEFRLWQWIKNLKIYEKLSSDNCTDFFLTNEQDFENLFEFLWNKKEIDHKGILEYLVKTKFPDLKPKQVKTKVKEYRWNYVYDHEKDESKTYPCGETYFLLKNKLDKIYNAQDDFLDKERLYNLWHIIYSVTDKKQYEKALAKFALKNHLDTKSFVNTFKRIPPFKNDYAIYSLKAIKKLLPLMRVGKYWNYDDIDPITKQKIQCIITGEENDTISTLVREKTNHFSNENDFKNLPLWLAGYIVYNSHNESSEIEKWKSPQDIDTFLKKFKQHALRNPIVEQVVTETLRVVRDIWSKKGQGKKDFFNEIHIELGKDLKNPVDKRRKLSSTNTKNESTNTRIKALLIELFTQGVENVKPNSPKHQEILKIFEEGALNSGIEIEEDIIKISNTDQPTKKQLELYILWLEHKYKSPYTGQSIPLSKLFTPNYEIEHIIPRSKYYDDNLSNKVICETEINRLKNNQLGYEFINNHEIREVTLEEGKTIRLLSPEQYWNFVTTYYAKNKAKRENLLLKELPVQMVEKQLNDTRYVSKYVMQLLSKIVRKEDGTDNGINSTNILSISGKMTRALKNDWDLNDVWNDLLLYRFERLNTITKTNLFTTYSEQKQKRMPIVPDQYAKGFHKKRLDHRHHALDAIVIACITRNHINYMNNQNIQGEKLKKNAIEKENYREILQKSRLDIRAQLCEKKYNDNDPTKYNWVFIKPWADFTENTKDILESIIPSFKQNLRIINKTVNYYEKYNENGKKVKVRQIKGDNWAIRKPLHKETISGKVHLSYKTPAKGKILTATRKVLDSSMDFKSIEKITDTGIQKILKNYLEYKKSPELAFSPEGIEELNATITKYNNGFHHKPIYKVRIYEEGVKFPLGNKGNKKSKYVEAEKGTNLFFAIYKDQENNRYFETIPFNDVLETLKKGMSAVPEKNQEENTLVFALSPQDLVFVPTLDEIENPDIVDFKNLTKDQTNRIYKMVSSSGKQCFFIKAEVATSIVNKMEFSTSNKMENSIEGIQIKSNCWKLKLDRLGTITRVIK

SEQ ID NO: 236 - protein, 1389 aa, Oenococcus kitaharae
MARDYSVGLDIGTSSVGWAAIDNKYHLIRAKSKNLIGVRLFDSAVTAEKRRGYRTTRRRLSRRHWRLRLLNDIFAGPLTDFGDENFLARLKYSWVHPQDQSNQAHFAAGLLFDSKEQDKDFYRKYPTIYHLRLALMNDDQKHDLREVYLAIHHLVKYRGHFLIEGDVKADSAFDVHTFADAIQRYAESNNSDENLLGKIDEKKLSAALTDKHGSKSQRAETAETAFDILDLQSKKQIQAILKSVVGNQANLMAIFGLDSSAISKDEQKNYKFSFDDADIDEKIADSEALLSDTEFEFLCDLKAAFDGLTLKMLLGDDKTVSAAMVRRFNEHQKDWEYIKSHIRNAKNAGNGLYEKSKKFDGINAAYLALQSDNEDDRKKAKKIFQDEISSADIPDDVKADFLKKIDDDQFLPIQRTKNNGTIPHQLHRNELEQIIEKQGIYYPFLKDTYQENSHELNKITALINFRVPYYVGPLVEEEQKIADDGKNIPDPTNHWMVRKSNDTITPWNLSQVVDLDKSGRRFIERLTGTDTYLIGEPTLPKNSLLYQKFDVLQELNNIRVSGRRLDIRAKQDAFEHLFKVQKTVSATNLKDFLVQAGYISEDTQIEGLADVNGKNFNNALTTYNYLVSVLGREFVENPSNEELLEEITELQTVFEDKKVLRRQLDQLDGLSDHNREKLSRKHYTGWGRISKKLLTTKIVQNADKIDNQTFDVPRMNQSIIDTLYNTKMNLMEIINNAEDDFGVRAWIDKQNTTDGDEQDVYSLIDELAGPKEIKRGIVQSFRILDDITKAVGYAPKRVYLEFARKTQESHLTNSRKNQLSTLLKNAGLSELVTQVSQYDAAALQNDRLYLYFLQQGKDMYSGEKLNLDNLSNYDIDHIIPQAYTKDNSLDNRVLVSNITNRRKSDSSNYLPALIDKMRPFWSVLSKQGLLSKHKFANLTRTRDFDDMEKERFIARSLVETRQIIKNVASLIDSHFGGETKAVAIRSSLTADMRRYVDIPKNRDINDYHHAFDALLFSTVGQYTENSGLMKKGQLSDSAGNQYNRYIKEWIHAARLNAQSQRVNPFGFVVGSMRNAAPGKLNPETGEITPEENADWSIADLDYLHKVMNFRKITVTRRLKDQKGQLYDESRYPSVLHDAKSKASINFDKHKPVDLYGGFSSAKPAYAALIKFKNKFRLVNVLRQWTYSDKNSEDYILEQIRGKYPKAEMVLSHIPYGQLVKKDGALVTISSATELHNFEQLWLPLADYKLINTLLKTKEDNLVDILHNRLDLPEMTIESAFYKAFDSILSFAFNRYALHQNALVKLQAHRDDFNALNYEDKQQTLERILDALHASPASSDLKKINLSSGFGRLFSPSHFTLADTDEFIFQSVTGLFSTQKTVAQLYQETK

SEQ ID NO: 237 - protein, 1425 aa, Prevotella micans
MIQKIFGLDLGTNSIGSSVRNLELGENLTEQLEFFSSDIFGSSVSKNSNGREYSLAGNRSAHRRSRGLNEARRRKLWATLDLLIEHGLCPMSPDSLMQWRTYDKQKGLYRQYPIEDKDFNAWIMLDFNGDGKPDYSSPYQLRRELVVRQFDFDQPIERYKLGRALYHIAQHRGFKSSKGETIADQEKNEKKPIAEEGADIANEMKASETKLSKGLVAYMQENHLKTVGEAFAKLEDERVRIRNNESYRAIRSQYQDEIKEIFTYQKKLSVESELYERLTSEKKGVGTIFYKRPLRSQRGNVGKCTLERNKPRCPIGRPEFEEFRAWTLINNIKIRETAGEPYKQLPIKLRQELLKDCFLSKVKADFKFEDIRKYIEKRLGLSFSNDDKTINYKDSVSIAACPVTVRMKKLLGENWANCRIDGEKRRQAHGKNNNNEHIVSYTEEDIWHVCYNAEDPEEVSNFARKALHWDENKIKELVRLWTSIPQGYAMLSLKAIRNINRMLLLGLKYSDAVLLAKLPDIVPVSDEDILAITKEFLQLEDKLNQEKQINNIVNSLIANYKSKLEENRFADHNYQYQLGEGDDEDINTQIKSHIGAKLWVQIGADEQTKIFQAVRSKYQDFFKSYKRKFVESPKLGELLVAFLTEKFPNVKSKQWERLYHPSQIAIYRPIPVDNDRSKLRLGNPNIGAIKNPTVMRVLNTLRRRVNQLLDDGVISPDETRVVVETARELNDANTKWALDRYNRIRRDENEKIRKILKELNPTTNSISEQDIDKARYIFEQCETDFYTDGKVPYYNKDIKKYKLWLEQGGQCLYTGQTINLTNLFNPNAFDMEHTIPKSISFDNSDQNLTLCESYYNRFIKKNNIPTDMPNYDKDVTINGKEYTAIKPRLQRWKERVDRLSRNVDFWKGQARRAQDKDRKDECIREKHLWDMELAYWKGKLERFTMTDVTDGFKNSQLVDTRVITRHAVLYLKSIFNHVEVQRGETTAEFRKILGLQSIDEKKDRSLHSHHAIDATMLTVIPSAAKRDRMLELFYKIEETKKALKNYNDNNKTGLNLELKGLEEKLDKEKKDCRVGRRVNDLDRFINENIIVSHHTKDQALTPAHRRLRKRGKIVGGKEHPRWQTGDSLRGEIHKASYYGAITQFAKDANGKVLMKDGQAQIDPTIYYVIRRELKYKRSTQDSGFTNWEDLEKVIVDTDLFGLMKGQFPEGTSFKDACEQGFYMIKKGKNGEGDVKTHRIRHVRCKAVKTALRIKEQTYKSSKDYKQFFYAAVGDLYVMCYYTDGKKRDFKIYSLYDISNHRKSGTEDIPKFITDKKGNHLPLDYKLRTGDMVLLYKDNPEELKDLDQVNLKRRLYKVNRFESEGLIILLTHHLSTTTERGCSIGKIENYQNLPTAIRCGIKTIKFLIMGKHRDFVIRNGNIEFKH

SEQ ID NO: 238 - protein, 1473 aa, Mucilaginibacter paludis
MKNILGLDLGTNSIGWALIEKDTDQKNGNILGTGSRIIPMSQDIKDEFGKGNSISQTADRTKFRSVRRLRERHLLRRERLHRVLNVLGFLPKHYADQIDFKKRLGKLVNETEPKLVYDNKNFIFKKSFEAMLSDFNQHQPLLLADGKKVPFDWTIYYLRKKALTEKIEKEELAWLILNFNQKRGYYQLRGEEEEENPNKMVAFHSLKIVEVIADESQKGKAETWYSLILENGWIYRRSSKTPLYDWKGKQRDFIVTTDLNDDGSIKTDKEGLEKRSFRAPVEDDWTLVKKKTEQEINRSHKTVGTYIYENLLQDPKQKIKGKLVRTIEREFYKDELKMILKNQQKFHPELNDEHLYINCVRELYRNNQAHQTILSKKDFVHLFIDDIIFYQRPLRSQKSSISNCTLEFRKYKNENGTDQTDYLKAIPKSHPLFQEFRLWQWIYNLGIYQKEDDTNVTDELIKNIDGYQDLFDFLNNKKEIRQDILIKFLVEQTGLKGKPLSSVVAKYRWNFVEDKIYPCNETGTQIRTRLAKVENTPEDFLTAETEIKLWHIIYSVNDKADYEKALKTFAEKHNLDTHSFVENFKKFPPFKSEYGSFSEKAIKKLLPLIRLGKYWSWENIDKKTQERIEKILTGEFDEAIKSRVRDKAIHLTEEDHFQGLQLWLASYVVYGRHSEADNLDKWHTVADLEDYLAEFRQHSLRNPIVEQVITETLRVVKDIWLQYGQGAKDFFSEIHIELAREMKNTGDERKRLTSLVTDNENTNLRIKVLLSELLNDGNVENVRPYSPMQQEALKIFEDGVLNSDIEIEDDILKISKMAQPTNTELKRYKLWLEQKYRSPYTGQIIPLNRLFTADYEIEHIIPQSRFFDDSFSNKIICESAVNQLKDKQLGLEFIKNHSGTIVKLGMGKTAKILDVESYNEFVKGNYTKNISKRNKLMLEEIPDKMIERQLNDTRYISKFIISALSNIVRSESNDDGFNSKNVLPGNGKITSRLKQDWGMNDIWNELILPRFERMNKITDSAVFTAWNENNQKFLPIVPLEFSKGFQKKRIDHRHHALDALVIAASTREHINLLNNEHAKSDKRFDLNRKLRKFEKVAYNDPKTGKRIEKEVPTIFLKPWETFTVDAKNSLESIIVSFKQNLRVINRATNYSESYNDENGALRLGKDGNPLKEKIKQSKGDSWAIRKPMHKDFVYGKVHLQNVKLPKDKFITAIRKSLDVTFDLKRIETITDTGIQKILKNYLHSKENKVELAFSPEGIEDMNQHIERYNDGKKHQPIHKVRVFEIGSRFSLGESGNKKTKFVEAAKGTNLFFAVYQDDNKGKRNYETIPLNIVIERQKLGLHSVPTEDAKGGKLLFHLSPNDMVYVPTSEELEDNLASVNIKRLNTAQRKRIYKVEKASGVECYFIRQDIAYLIKNYDAKTKIGELESQNKLQTTMTDDRLKITDVCVKLNIDRLGSIAETFLGNQYGASKKT

SEQ ID NO: 239 - protein, 1365 aa, Filifactor alocis
MTKEYYLGLDVGTNSVGWAVTDSQYNLCKFKKKDMWGIRLFESANTAKDRRLQRGNRRRLERKKQRIDLLQEIFSPEICKIDPTFFIRLNESRLHLEDKSNDFKYPLFIEKDYSDIEYYKEFPTIFHLRKHLIESEEKQDIRLIYLALHNIIKTRGHFLIDGDLQSAKQLRPILDTFLLSLQEEQNLSVSLSENQKDEYEEILKNRSIAKSEKVKKLKNLFEISDELEKEEKKAQSAVIENFCKFIVGNKGDVCKFLRVSKEELEIDSFSFSEGKYEDDIVKNLEEKVPEKVYLFEQMKAMYDWNILVDILETEEYISFAKVKQYEKHKTNLRLLRDIILKYCTKDEYNRMFNDEKEAGSYTAYVGKLKKNNKKYWIEKKRNPEEFYKSLGKLLDKIEPLKEDLEVLTMMIEECKNHTLLPIQKNKDNGVIPHQVHEVELKKILENAKKYYSFLTETDKDGYSVVQKIESIFRFRIPYYVGPLSTRHQEKGSNVWMVRKPGREDRIYPWNMEEIIDFEKSNENFITRMTNKCTYLIGEDVLPKHSLLYSKYMVLNELNNVKVRGKKLPTSLKQKVFEDLFENKSKVTGKNLLEYLQIQDKDIQIDDLSGFDKDFKTSLKSYLDFKKQIFGEEIEKESIQNMIEDIIKWITIYGNDKEMLKRVIRANYSNQLTEEQMKKITGFQYSGWGNFSKMFLKGISGSDVSTGETFDIITAMWETDNNLMQILSKKFTFMDNVEDFNSGKVGKIDKITYDSTVKEMFLSPENKRAVWQTIQVAEEIKKVMGCEPKKIFIEMARGGEKVKKRTKSRKAQLLELYAACEEDCRELIKEIEDRDERDFNSMKLFLYYTQFGKCMYSGDDIDINELIRGNSKWDRDHIYPQSKIKDDSIDNLVLVNKTYNAKKSNELLSEDIQKKMHSFWLSLLNKKLITKSKYDRLTRKGDFTDEELSGFIARQLVETRQSTKAIADIFKQIYSSEVVYVKSSLVSDFRKKPLNYLKSRRVNDYHHAKDAYLNIVVGNVYNKKFTSNPIQWMKKNRDTNYSLNKVFEHDVVINGEVIWEKCTYHEDTNTYDGGTLDRIRKIVERDNILYTEYAYCEKGELFNATIQNKNGNSTVSLKKGLDVKKYGGYFSANTSYFSLIEFEDKKGDRARHIIGVPIYIANMLEHSPSAFLEYCEQKGYQNVRILVEKIKKNSLLIINGYPLRIRGENEVDTSFKRAIQLKLDQKNYELVRNIEKFLEKYVEKKGNYPIDENRDHITHEKMNQLYEVLLSKMKKFNKKGMADPSDRIEKSKPKFIKLEDLIDKINVINKMLNLLRCDNDTKADLSLIELPKNAGSFVVKKNTIGKSKIILVNQSVTGLYENRREL

SEQ ID NO: 240 - protein, 1130 aa, Streptococcus macedonicus
MTNGKILGLDIGIASVGVGIIEAKTGKVVHANSRLFSAANAENNAERRGFRGSRRLNRRKKHRVKRVRDLFEKYGIVTDFRNLNLNPYELRVKGLTEQLTNEELFAALRTISKRRGISYLDDAEDDSTGSTDYAKSIDENRRLLKTKTPGQIQLERLEKYGQLRGNFTVYDENGEAHRLINVFSTSDYEKEARKILETQADYNKKITAEFIDDYVEILTQKRKYYHGPGNEKSRTDYGRFRTDGTTLENIFGILIGKCNFYPDEYRASKASYTAQEYNFLNDLNNLKVPTETGKLSTEQKESLVEFAKNTAILGPAKLLKEIAKILDCKVDEIKGYREDDKGKPDLHTFEPYRKLKFNLDSVNIDYLSREVLDKLADILTLNTEREGIEDAIKRNLPNQFTEEQISEIINVRKSQSTAFNKGWHSFSAKLMNELIPELYATSDEQMTILTRLEKFKVKKKSSKNIKTIDEKEITDEIYNPVVAKSVRQTIKIINAAVKKYGDFDKIVIEMPRDKNADDEKKFINKRNKENKKEKDDALKRAAYLYNGTDKLPDEVFHGNKQLETKIRLWYQQGERCLYSGKPIPIQELVHNSNNFEIDHILPLSLSFDDSLANKVLVYSWTNQEKGQKTPYQVIDSMDAAWSFREMKEYVLKQKGLGKKKRDYLLTTENIDKIEVKKKFIERNLVDTRYASRVVLNSLQSALRELGKDTKVSVVRGQFTSQLRRKWKIDKSRETYHHHAVDALIIAASSQLKLWEKQDNPMFVDYGNNQVVDKQTGEILSVSDNEYKELVFQPPYQGFVNTISSKGFEDEILFSYQVDSKYNRKVSDATIYSTRKAKIGKDKKEETYVLGKIKDIYSQNGFDTFVKKYNKDKTQFLMYQKDPLTWENVIEVILGDYPTTKKSEDGKNDVKCNPFEEYRRENGLICKYSKKGKGTPIKSLKYYDKKLGNCIDITPEESRNKVILQSINPWRADVYFNPETLKYELMGLKYSDLSFEKGTGNYHISQEKYDAIKEKEGIGKKSEFKFTLYRNDLILIKDIASGEQEIYRFLSRTMPNVNHYVELKPYDKEKFDNVQELVEALGEADKVGRCIKSLNKPNISIYKVRTDVLGNKYFVKKEGDKPKLDFKNNKK

SEQ ID NO: 241 - protein, 1367 aa, Streptococcus pyogenes
MDKKYSIGLDIGTNSVGWAVITDDYKVPSKKFKVLGNTDRHSIKKNLIGALLFGSGETAEATRLKRTARRRYTRRKNRICYLQEIFSNEMAKVDDSFFHRLEESFLVEEDKKHERHPIFGNIVDEVAYHEKYPTIYHLRKKLADSTDKADLRLIYLALAHMIKFRGHFLIEGDLNPDNSDVDKLFIQLVQIYNQLFEENPINASRVDAKAILSARLSKSRRLENLIAQLPGEKRNGLFGNLIALSLGLTPNFKSNFDLAEDAKLQLSKDTYDDDLDNLLAQIGDQYADLFLAAKNLSDAILLSDILRVNSEITKAPLSASMIKRYDEHHQDLTLLKALVRQQLPEKYKEIFFDQSKNGYAGYIDGGASQEEFYKFIKPILEKMDGTEELLVKLNREDLLRKQRTFDNGSIPHQIHLGELHAILRRQEDFYPFLKDNREKIEKILTFRIPYYVGPLARGNSRFAWMTRKSEETITPWNFEEVVDKGASAQSFIERMTNFDKNLPNEKVLPKHSLLYEYFTVYNELTKVKYVTEGMRKPAFLSGEQKKAIVDLLFKTNRKVTVKQLKEDYFKKIECFDSVEISGVEDRFNASLGAYHDLLKIIKDKDFLDNEENEDILEDIVLTLTLFEDRGMIEERLKTYAHLFDDKVMKQLKRRRYTGWGRLSRKLINGIRDKQSGKTILDFLKSDGFANRNFMQLIHDDSLTFKEDIQKAQVSGQGHSLHEQIANLAGSPAIKKGILQTVKIVDELVKVMGHKPENIVIEMARENQTTQKGQKNSRERMKRIEEGIKELGSQILKEHPVENTQLQNEKLYLYYLQNGRDMYVDQELDINRLSDYDVDHIVPQSFIKDDSIDNKVLTRSDKNRGKSDNVPSEEVVKKMKNYWRQLLNAKLITQRKFDNLTKAERGGLSELDKAGFIKRQLVETRQITKHVAQILDSRMNTKYDENDKLIREVKVITLKSKLVSDFRKDFQFYKVREINNYHHAHDAYLNAVVGTALIKKYPKLESEFVYGDYKVYDVRKMIAKSEQEIGKATAKYFFYSNIMNFFKTEITLANGEIRKRPLIETNGETGEIVWDKGRDFATVRKVLSMPQVNIVKKTEVQTGGFSKESILPKRNSDKLIARKKDWDPKKYGGFDSPTVAYSVLVVAKVEKGKSKKLKSVKELLGITIMERSSFEKNPIDFLEAKGYKEVKKDLIIKLPKYSLFELENGRKRMLASAGELQKGNELALPSKYVNFLYLASHYEKLKGSPEDNEQKQLFVEQHKHYLDEIIEQISEFSKRVILADANLDKVLSAYNKHRDKPIREQAENIIHLFTLTNLGAPAAFKYFDTTIDRKRYTSTKEVLDATLIHQSITGLYETRIDLSQLGGD

SEQ ID NO: 242 - protein, 1233 aa, Mycoplasma canis
MEKKRKVTLGFDLGIASVGWAIVDSETNQVYKLGSRLFDAPDTNLERRTQRGTRRLLRRRKYRNQKFYNLVKRTEVFGLSSREAIENRFRELSIKYPNIIELKTKALSQEVCPDEIAWILHDYLKNRGYFYDEKETKEDFDQQTVESMPSYKLNEFYKKYGYFKGALSQPTESEMKDNKDLKEAFFFDFSNKEWLKEINYFFNVQKNILSETFIEEFKKIFSFTRDISKGPGSDNMPSPYGIFGEFGDNGQGGRYEHIWDKNIGKCSIFTNEQRAPKYLPSALIFNFLNELANIRLYSTDKKNIQPLWKLSSVDKLNILLNLFNLPISEKKKKLTSTNINDIVKKESIKSIMISVEDIDMIKDEWAGKEPNVYGVGLSGLNIEESAKENKFKFQDLKILNVLINLLDNVGIKFEFKDRNDIIKNLELLDNLYLFLIYQKESNNKDSSIDLFIAKNESLNIENLKLKLKEFLLGAGNEFENHNSKTHSLSKKAIDEILPKLLDNNEGWNLEAIKNYDEEIKSQIEDNSSLMAKQDKKYLNDNFLKDAILPPNVKVTFQQAILIFNKIIQKFSKDFEIDKVVIELAREMTQDQENDALKGIAKAQKSKKSLVEERLEANNIDKSVFNDKYEKLIYKIFLWISQDFKDPYTGAQISVNEIVNNKVEIDHIIPYSLCFDDSSANKVLVHKQSNQEKSNSLPYEYIKQGHSGWNWDEFTKYVKRVFVNNVDSILSKKERLKKSENLLTASYDGYDKLGFLARNLNDTRYATILFRDQLNNYAEHHLIDNKKMFKVIAMNGAVTSFIRKNMSYDNKLRLKDRSDFSHHAYDAAIIALFSNKTKTLYNLIDPSLNGIISKRSEGYWVIEDRYTGEIKELKKEDWTSIKNNVQARKIAKEIEEYLIDLDDEVFFSRKTKRKTNRQLYNETIYGIATKTDEDGITNYYKKEKFSILDDKDIYLRLLREREKFVINQSNPEVIDQIIEIIESYGKENNIPSRDEAINIKYTKNKINYNLYLKQYMRSLTKSLDQFSEEFINQMIANKTFVLYNPTKNTTRKIKFLRLVNDVKINDIRKNQVINKFNGKNNEPKAFYENINSLGAIVFKNSANNFKTLSINTQIAIFGDKNWDIEDFKTYNMEKIEKYKEIYGIDKTYNFHSFIFPGTILLDKQNKEFYYISSIQTVRDIIEIKFLNKIEFKDENKNQDTSKTPKRLMFGIKSIMNNYEQVDISPFGINKKIFE

SEQ ID NO: 243 - protein, 1375 aa, Lactobacillus johnsonii
MTKIKDDYIVGLDIGTDSCGWVAMNSNNDILKLQGKTAIGSRLFEGGKSAAERRLFRTTHRRIKRRRWRLKLLEEFFDPYMAEVDPYFFARLKESGLSPLDKRKTVSSIVFPTSAEDKKFYDDYPTIYHLRYKLMTEDEKFDLREVYLAIHHIIKYRGNFLYNTSVKDFKASKIDVKSSIEKLNELYENLGLDLNVEFNISNTAEIEKVLKDKQIFKRDKVKKIAELFAIKTDNKEQSKRIKDISKQVANAVLGYKTRFDTIALKEISKDELSDWNFKLSDIDADSKFEALMGNLDENEQAILLTIKELFNEVTLNGIVEDGNTLSESMINKYNDHRDDLKLLKEVIENHIDRKKAKELALAYDLYVNNRHGQLLQAKKKLGKIKPRSKEDFYKVVNKNLDDSRASKEIKKKIELDSFMPKQRTNANGVIPYQLQQLELDKIIENQSKYYPFLKEINPVSSHLKEAPYKLDELIRFRVPYYVGPLISPNESTKDIQTKKNQNFAWMIRKEEGRITPWNFDQKVDRIESANKFIKRMTTKDTYLFGEDVLPANSLLYQKFTVLNELNNIRINGKRISVDLKQEIYENLFKKHTTVTVKKLENYLKENHNLVKVEIKGLADEKKFNSGLTTYNRFKNLNIFDNQIDDLKYRNDFEKIIEWSTIFEDKSIYKEKLRSIDWLNEKQINALSNIRLQGWGRLSKKLLAQLHDHNGQTIIEQLWDSQNNFMQIVTQADFKDAIAKANQNLLVATSVEDILNNAYTSPANKKAIRQVIKVVDDIVKAASGKVPKQIAIEFTRDADENPKRSQTRGSKLQKVYKDLSTELASKTIAEELNEAIKDKKLVQDKYYLYFMQLGRDAYTGEPINIDEIQKYDIDHILPQSFIKDDALDNRVLVSRAVNNGKSDNVPVKLFGNEMAANLGMTIRKMWEEWKNIGLISKTKYNNLLTDPDHINKYKSAGFIRRQLVETSQIIKLVSTILQSRYPNTEIITVKAKYNHYLREKFDLYKSREVNDYHHAIDAYLSAICGNLLYQNYPNLRPFFVYGQYKKFSSDPDKEKAIFNKTRKFSFISQLLKNKSENSKEIAKKLKRAYQFKYMLVSRETETRDQEMFKMTVYPRFSHDTVKAPRNLIPKKMGMSPDIYGGYTNNSDAYMVIVRIDKKKGTEYKILGIPTRELVNLKKAEKEDHYKSYLKEILTPRILYNKNGKRDKKITSFEIVKSKIPYKQVIQDGDKKFMLGSSTYVYNAKQLTLSTESMKAITNNFDKDSDENDALIKAYDEILDKVDKYLPLFDINKFREKLHSGREKFIKLSLEDKKDTILKVLEGLHDNAVMTKIPTIGLSTPLGFMQFPNGVILSENAKLIYQSPTGLFKKSVKISDL

SEQ ID NO: 244 - protein, 1053 aa, Staphylococcus aureus
MKRNYILGLDIGITSVGYGIIDYETRDVIDAGVRLFKEANVENNEGRRSKRGARRLKRRRRHRIQRVKKLLFDYNLLTDHSELSGINPYEARVKGLSQKLSEEEFSAALLHLAKRRGVHNVNEVEEDTGNELSTKEQISRNSKALEEKYVAELQLERLKKDGEVRGSINRFKTSDYVKEAKQLLKVQKAYHQLDQSFIDTYIDLLETRRTYYEGPGEGSPFGWKDIKEWYEMLMGHCTYFPEELRSVKYAYNADLYNALNDLNNLVITRDENEKLEYYEKFQIIENVFKQKKKPTLKQIAKEILVNEEDIKGYRVTSTGKPEFTNLKVYHDIKDITARKEIIENAELLDQIAKILTIYQSSEDIQEELTNLNSELTQEEIEQISNLKGYTGTHNLSLKAINLILDELWHTNDNQIAIFNRLKLVPKKVDLSQQKEIPTTLVDDFILSPVVKRSFIQSIKVINAIIKKYGLPNDIIIELAREKNSKDAQKMINEMQKRNRQTNERIEEIIRTTGKENAKYLIEKIKLHDMQEGKCLYSLEAIPLEDLLNNPFNYEVDHIIPRSVSFDNSFNNKVLVKQEENSKKGNRTPFQYLSSSDSKISYETFKKHILNLAKGKGRISKTKKEYLLEERDINRFSVQKDFINRNLVDTRYATRGLMNLLRSYFRVNNLDVKVKSINGGFTSFLRRKWKFKKERNKGYKHHAEDALIIANADFIFKEWKKLDKAKKVMENQMFEEKQAESMPEIETEQEYKEIFITPHQIKHIKDFKDYKYSHRVDKKPNRELINDTLYSTRKDDKGNTLIVNNLNGLYDKDNDKLKKLINKSPEKLLMYHHDPQTYQKLKLIMEQYGDEKNPLYKYYEETGNYLTKYSKKDNGPVIKKIKYYGNKLNAHLDITDDYPNSRNKVVKLSLKPYRFDVYLDNGVYKFVTVKNLDVIKKENYYEVNSKCYEEAKKLKKISNQAEFIASFYNNDLIKINGELYRVIGVNNDLLNRIEVNMIDITYREYLENMNDKRPPRIIKTIASKTQSIKKYSTDILGNLYEVKSKKHPQIIKKG

SEQ ID NO: 245 - protein, 1063 aa, Simonsiella muelleri
MEKFHYVLGLDLGIASVGWAAIEIDKETETSIGLLDCGVRTFERAEVPKTGDSLAKARREARSTRRLIRRRSHRLLRLKRLLKREIFRQPETFKDLPINAWQLRVKGLDSRLNEYEWAAVLLHLVKHRGYLSQRKSEMSETDSKSEMGRLLAGVAENHQLLQQEQYRTPAELALKKFVKHFRNKGGDYAHTFNRLDLQAELHLLFQKQRELGNPFTSPELERQVDDLLMTQRSALQGDAILKMLGHCGFEPEQFKAAKNTFSAERFIWLTKLNNLRIQDQGKERALTADERTKLLDEPYKKSKLTYAQVRKLLSLPQTAIFKGLRYDLEHDKKAENSTLMEMKSYHNIRQTLEKSGLKTEWQSIATQPEILDAIGTAFSIYKTDEDISHELKTCRLPENVLNELLKNINFDGFIQLSLTALRKILPLMEQGYRYDEACTQIYGNHHSGSLQQESKQFLPHIPIDDVRNPVVFRTLTQARKVVNAIIRRYGSPARVHIEMARELGKSKSDRDRIEKQQQKNKKERENAVAKFKEDFPDFVGEPRGKDILKMRLYEQQHGKCLYSGHDIDINRLNEKGYVEIDHALPFSRTWDDSQNNKVLVLGSENQNKRNQTPDEYLDGANNSQRWLEFQARVQTCHFSYGKKQRIQLAKLDDETEKGFLERNLNDTRYIARFMCQFVQENLYLTGKGKRLVFASNGGMTATLRNLWGLRKVREDNDRHHALDAIVVACSTASMQQKITKAFQRHESIEYVDTETGEVKFRIPQPWDFFRQEVMIRVFSDQPCEDLVEKLSARPEALHDNVTPLFVSRAPNRKMSGQGHLETIKSAKRLSEENSMVKKPLTTLKLKDIPEIVGYPSREPQLYAALKTRLETHDDDPIKAFAKPFYKPNKNGELGALVRSVRVKGVQNTGVMVHDGKGIADNATMVRVDVYTKAGKNYLVPVYVWQVAQGILPNRAVTSGKSEADWDLIDESFEFKFSLSRGDLVEMISNKGRIFGYYNGLDRANGSIGIREHDLEKSKGKDGVHRVGVKTATAFNKYHVDPLGKEIHRCSSEPRPTLKIKSKK

SEQ ID NO: 246 - protein, 1509 aa, Psychroflexus torquis
MKRILGLDLGTNSIGWSLIEHDFKNKQGQIEGLGVRIIPMSQEILGKFDAGQSISQTADRTKYRGVRRLYQRDNLRRERLHRVLKILDFLPKHYSESIDFQDKVGQFKPKQEVKLNYRKNEKNKHEFVFMNSFIEMVSEFKNAQPELFYNKGNGEETKIPYDWTLYYLRKKALTQQITKEELAWLILNFNQKRGYYQLRGEDIDEDKNKKYMQLKVNNLIDSGAKVKGKVLYNVIFDNGWKYEKQIVNKDEWEGRTKEFIITTKTLKNGNIKRTYKAVDSEIDWAAIKAKTEQDINKANKTVGEYIYESLLDNPSQKIRGKLVKTIERKFYKEEFEKLLSKQIELQPELFNESLYKACIKELYPRNENHQSNNKKQGFEYLFTEDIIFYQRPLKSQKSNISGCQFEHKIYKQKNKKTGKLELIKEPIKTISRSHPLFQEFRIWQWLQNLKIYNKEKIENGKLEDVTTQLLPNNEAYVTLFDFLNTKKELEQKQFIEYFVKKKLIDKKEKEHFRWNFVEDKKYPFSETRAQFLSRLAKVKGIKNTEDFLNKNTQVGSKENSPFIKRIEQLWHIIYSVSDLKEYEKALEKFAEKHNLEKDSFLKNFKKFPPFVSDYASYSKKAISKLLPIMRMGKYWSESAVPTQVKERSLSIMERVKVLPLKEGYSDKDLADLLSRVSDDDIPKQLIKSFISFKDKNPLKGLNTYQANYLVYGRHSETGDIQHWKTPEDIDRYLNNFKQHSLRNPIVEQVVMETLRVVRDIWEHYGNNEKDFFKEIHVELGREMKSPAGKREKLSQRNTENENTNHRIREVLKELMNDASVEGGVRDYSPSQQEILKLYEEGIYQNPNTNYLKVDEDEILKIRKKNNPTQKEIQRYKLWLEQGYISPYTGKIIPLTKLFTHEYQIEHIIPQSRYYDNSLGNKIICESEVNEDKDNKTAYEYLKVEKGSIVFGHKLLNLDEYEAHVNKYFKKNKTKLKNLLSEDIPEGFINRQLNDSRYISKLVKGLLSNIVRENGEQEATSKNLIPVTGVVTSKLKQDWGLNDKWNEIIAPRFKRLNKLTNSNDFGFWDNDINAFRIQVPDSLIKGFSKKRIDHRHHALDALVVACTSRNHTHYLSALNAENKNYSLRDKLVIKNENGDYTKTFQIPWQGFTIEAKNNLEKTVVSFKKNLRVINKTNNKFWSYKDENGNLNLGKDGKPKKKLRKQTKGYNWAIRKPLHKETVSGIYNINAPKNKIATSVRTLLTEIKNEKHLAKITDLRIRETILPNHLKHYLNNKGEANFSEAFSQGGIEDLNKKITTLNEGKKHQPIYRVKIFEVGSKFSISEDENSAKSKKYVEAAKGTNLFFAIYLDEENKKRNYETIPLNEVITHQKQVAGFPKSERLSVQPDSQKGTFLFTLSPNDLVYVPNNEELENRDLFNLGNLNVEQISRIYKFTDSSDKTCNFIPFQVSKLIFNLKKKEQKKLDVDFIIQNEFGLGSPQSKNQKSIDDVMIKEKCIKLKIDRLGNISKA

SEQ ID NO: 247 - protein, 1112 aa, Staphylococcus simulans
MLVGLKFKQSILFENMENAEDIKESATGSDAISLSDDYYENLSEFLTDEQLNFIESANTFFMGIMLDRILKGATSISAAKVRDYKIFKSQLKLIKDIVYQNKYDKYHEFFVTSKEDMRAYQENPDAKNFGKLSKFDQYLIHSKDQYAKLMKDLKGLVPKEYTEVLNLIDEQKFLVVQNTTDNASIPYQNNVFEAENILRNQQKYYPEITEEMIGKVINLISFRIPYYVGPLTNKNGQSDFAWMIRKSDEQTLPWNFDKVIDKSKSAEKFIRRMTSKCTYLLEEDVLPKHSLLYQEMEVLNELNNVQLRGENEPKHRIHRLDPKVKQFIYHNLFQKKKNVTHKDLITLLQNSEHRNTLNKTSGQKLKVFGTQNDSKFASKLSTYNDMKAILGSVENKRQMIEELVLWITIFEDKAILKQKIGEKYPNITEKQLNQIVKLNYSGWGRLSEKLLTKEVNGRSLIDLMYSTENNFMEIITDKTLGFDCFIKNSNKVKNAKISYKDVAELRTSPALKKGIWNAIKMVREISNLFGAPEKIIIEFATEDQAKGKRQKSRSELWDDLVKKNNLKRNKEFEGLFEELKAYPDLDFSNPKLWLYIHQNGKCMYTKKPIDLERLMSDTNNQLYEIDHILPRTFVKDDSINNKVLVIQSANQKKSGDKMPLEIFDNHVLVPFWKMLYENDLISSSKLSKLMKKEFNDLDKEGFIQRQLVETRQIISHVSDFLTEEYPSTTVVPMKANVVSELRRKFDIPKIRQLNDWHHAVDAYLNGFVYQAARVFYPKVNLFEFNFKWEKVREKWRQLGEFTENNKKREFFLFKRMENYVNEYGEGMISKLIFDLDNFKFNYSRKVESTESAFYKQSAFSPKNTTAQYDSDKNKTAIYKEMKNKRGIVVSYTYVKKDQELIGYGVFNETVFEYVNNADVDMNTRALKIVRKAFPKLDIKKAQYLFSINKGDALLVNGHPFLFVSAYERINGKQLEFDIAMQRKIKQALSPYNNMTEQEKVEFYNQFAEKVIEEFRNSIGLQSRDRKVNLIKNLFNNTEKSNDSMTQSILEVLKMTKVSAERSKELKIRWNGQTPNTFIDTKNNAEIQYKSITGLKTTKPKSIFKLAESKNEL

SEQ ID NO: 248 - protein, 1274 aa, Mycoplasma gallisept
MNINMNNSIKSKPEVTIGLDLGVGSVGWAIVDNETNIIHHLGSRLFSQAKTAEDRRSFRGVRRLIRRRKYKLKRFVNLIWKYNSYFGFKNKEDILNNYQEQQKLHNTVLNLKLEALNAKIDPKALSWILHDYLKNRGHFYEDNRDFNVYPTEELANYFDEFGYYKGIIDSKNDDDDKLEEGLTKYKFSNQHWLEEVKKVLSNQTGLPEKFKEEYESLFSYVRNYSEGPGSINSVSPYGIYHLDEKEGKVVQKYNNIWDKTIGKCSIFPDEYRAPKNSPIAMIFNEINELSTIRSYSIYLTGWFINQEFKKAYLNKLLDLLIKTNSEKPIDARQFKKLREETIAESIGKETLKDVESEEKLEKDDHKWKLKGLKLNTNGKIQYNDLSSLAKFVHKLKQHLKLDFLLEDQYTPLDKINFLQSLYVYLGKHLRYSNRVDSANLKEFSDSSRLFERVLQEQKDGLFKLFEQTDKDDEKILTQTHSLSTKAMLLAITRMTNLDNDEDNQKNNDKGWNFEAIKNFDQKFIDITKTNNNLSLKQDKRYLDDQFINDAILSPGVKRILREATKVFNAILKQFSEEYDVTKVVIELARELSEEKELENTKNYKKLIKKNGDKISEGLKALGIAEDKIEEILKSPTKSYKVLLWLQQDHIDPYSQKEIAFDDILTKTEKTEIDHIIPYSISFDDSSSNKLLVLAESNQAKSNQTPYEFINSGKAEITWEVYEAYCHKFKNGDSSLLDSTQRSKKFAKMMKTDTSSKYDIGFLARNLNDTRYATIVFRDALKDYANNHLVEDKPMFKVVCINGGVTSFLRKNFDPKSWYAKKDRDKNIHHAVDASIISIFSNETKTLFNQLTKFADYKLFKNTDGSWKKIDPKTGVVSEVTDENWKQIRVRNQVSEIAKVIDKYIQDSNIERKARYSRKIENKTNISLFNDTVYSAKKVGYEDQIKRKNLKTLDIHESAEENKNSKVKKQFVYRKLVNVSLLNNDKLADLFAEKEDILMYRANPWVINLAEQIFNEYTENKKIKSQNVFEKYMLDLTKEFPEKFSEAFVKSMIRNKTAIIYNVEKDVVHRIKRLKILSSELKENKWSNVIIRSKNESGTKLSYQDTINSIALMIMRSIDPTAKKQYIRVPLNTLNLHLGDQDFDLHNIDAYLKKPKFVKYLKANEIGDEYKPWRVLTSGTLLIHKKDKKLMYISSFQNLNDLIEIKNLIETEYKENVDSDPKKKKKASQILRSLSVILNDYILLDAKYNFDILGLSKNKIDEILNSKLDLDKIAK

SEQ ID NO: 249 - protein, 1122 aa, Artificial Sequence; identical to SEQ ID NO: 18
  Synthetic amino acid sequence

SEQ ID NO: 250 - protein, 1236 aa, Artificial Sequence; identical to SEQ ID NO: 16
  Synthetic amino acid sequence

SEQ ID NO: 251 - protein, 1059 aa, Artificial Sequence; identical to SEQ ID NO: 10
  Synthetic amino acid sequence

SEQ ID NO: 252 - protein, 1166 aa, Artificial Sequence; identical to SEQ ID NO: 34
  Synthetic amino acid sequence

SEQ ID NO: 253 - protein, 1149 aa, Artificial Sequence; identical to SEQ ID NO: 32
  Synthetic amino acid sequence

SEQ ID NO: 254 - protein, 1314 aa, Artificial Sequence; identical to SEQ ID NO: 22
  Synthetic amino acid sequence

SEQ ID NO: 255 - protein, 1064 aa, Artificial Sequence; identical to SEQ ID NO: 33
  Synthetic amino acid sequence

SEQ ID NO: 256 - protein, 1401 aa, Artificial Sequence
  Synthetic amino acid sequence
MDKKYSIGLDIGTNSVGWAVITDEYKVPSKKFKVLGNTDRHSIKKNLIGALLFDSGETAEATRLKRTARRRYTRRKNRICYLQEIFSNEMAKVDDSFFHRLEESFLVEEDKKHERHPIFGNIVDEVAYHEKYPTIYHLRKKLVDSTDKADLRLIYLALAHMIKFRGHFLIEGDLNPDNSDVDKLFIQLVQTYNQLFEENPINASGVDAKAILSARLSKSRRLENLIAQLPGEKKNGLFGNLIALSLGLTPNFKSNFDLAEDAKLQLSKDTYDDDLDNLLAQIGDQYADLFLAAKNLSDAILLSDILRVNTEITKAPLSASMIKRYDEHHQDLTLLKALVRQQLPEKYKEIFFDQSKNGYAGYIDGGASQEEFYKFIKPILEKMDGTEELLVKLNREDLLRKQRTFDNGSIPHQIHLGELHAILRRQEDFYPFLKDNREKIEKILTFRIPYYVGPLARGNSRFAWMTRKSEETITPWNFEEVVDKGASAQSFIERMTNFDKNLPNEKVLPKHSLLYEYFTVYNELTKVKYVTEGMRKPAFLSGEQKKAIVDLLFKTNRKVTVKQLKEDYFKKIECFDSVEISGVEDRFNASLGTYHDLLKIIKDKDFLDNEENEDILEDIVLTLTLFEDREMIEERLKTYAHLFDDKVMKQLKRRRYTGWGRLSRKLINGIRDKQSGKTILDFLKSDGFANRNFMQLIHDDSLTFKEDIQKAQVSGQGDSLHEHIANLAGSPAIKKGILQTVKVVDELVKVMGRHKPENIVIEMARENQTTQKGQKNSRERMKRIEEGIKELGSQILKEHPVENTQLQNEKLYLYYLQNGRDMYVDQELDINRLSDYDVDHIVPQSFLKDDSIDNKVLTRSDKNRGKSDNVPSEEVVKKMKNYWRQLLNAKLITQRKFDNLTKAERGGLSELDKAGFIKRQLVETRQITKHVAQILDSRMNTKYDENDKLIREVKVITLKSKLVSDFRKDFQFYKVREINNYHHAHDAYLNAVVGTALIKKYPKLESEFVYGDYKVYDVRKMIAKSEQEIGKATAKYFFYSNIMNFFKTEITLANGEIRKRPLIETNGETGEIVWDKGRDFATVRKVLSMPQVNIVKKTEVQTGGFSKESILPKRNSDKLIARKKDWDPKKYGGFDSPTVAYSVLVVAKVEKGKSKKLKSVKELLGITIMERSSFEKNPIDFLEAKGYKEVKKDLIIKLPKYSLFELENGRKRMLASAGELQKGNELALPSKYVNFLYLASHYEKLKGSPEDNEQKQLFVEQHKHYLDEIIEQISEFSKRVILADANLDKVLSAYNKHRDKPIREQAENIIHLFTLTNLGAPAAFKYFDTTIDRKRYTSTKEVLDATLIHQSITGLYETRIDLSQLGGDAYPYDVPDYASLGSGSPKKKRKVEDPKKKRKVD

SEQ ID NO: 257 - protein, 1368 aa, Artificial Sequence
  Synthetic amino acid sequence
MDKKYSIGLAIGTNSVGWAVITDDYKVPSKKLKGLGNTDRHGIKKNLIGALLFDSGETAEATRLKRTARRRYTRRKNRICYLQEIFSNEMAKVDDSFFHRLEESFLVEEDKKHERHPIFGNIVDEVAYHEKYPTIYHLRKKLADSTDKVDLRLIYLALAHMIKFRGHFLIEGDLNPDNSDVDKLFIQLVQTYNQLFEENPINASRVDAKAILSARLSKSRRLENLIAQLPGEKKNGLFGNLIALSLGLTPNFKSNFDLAEDAKLQLSKDTYDDDLDNLLAQIGDQYADLFLAAKNLSDATLLSDILRVNSEITKAPLSASMIKRYDEHHQDLTLLKALVRQQLPEKYKEIFFDQSKNGYAGYIDGGASQEEFYKFIKPILEKMDGTEELLAKLNREDLLRKQRTFDNGSIPYQIHLGELHAILRRQEDFYPFLKDNREKIEKILTFRIPYYVGPLARGNSRFAWMTRKSEETITPWNFEEVVDKGASAQSFIERMTNFDKNLPNEKVLPKHSLLYEYFTVYNELTKVKYVTEGMRKPAFLSGEQKKAIVDLLFKTNRKVTVKQLKEDYFKKIECFDSVEISGVEDRFNASLGTYHDLLKIIKDKDFLDNEENEDILEDIVLTLTLFEDREMIEERLKTYAHLFDDKVMKQLKRRRYTGWGRLSRKLINGIRDKQSGKTILDFLKSDGFANRNFMQLIHDDSLTFKEDIQKAQVSGQGDSLHEHIANLAGSPAIKKGILQTVKVVDELVKVMGRHKPENIVIEMARENQTTQKGQKNSRERMKRIEEGIKELGSDILKEYPVENTQLQNEKLYLYYLQNGRDMYVDQELDINRLSDYDVDHIVPQSFLKDDSIDNKVLTRSDKNRGKSDNVPSEEVVKKMKNYWRQLLNAKLITQRKFDNLTKAERGGLSELDKVGFIKRQLVETRQITKHVAQILDSRMNTKYDENDKLIREVRVITLKSKLVSDFRKDFQFYKVREINNYHHAHDAYLNAVVGTALIKKYPKLESEFVYGDYKVYDVRKMIAKSEQEIGKATAKYFFYSNIMNFFKTEITLANGEIRKRPLIETNGETGEIVWDKGRDFATVRKVLSMPQVNIVKKTEVQTGGFSKESILPKRNSDKLIARKKDWDPKKYGGFDSPTVAYSVLVVAKVEKGKSKKLKSVKELLGITIMERSSFEKDPIDFLEAKGYKEVRKDLIIKLPKYSLFELENGRKRMLASAGELQKGNELALPSKYVNFLYLASHYEKLKGSPEDNEQKQLFVEQHKHYLDEIIEQISEFSKRVILADANLDKVLSAYNKHRDKPIREQAENIIHLFTLTNLGAPAAFKYFDTTIDRKRYTSTKEVLDATLIHQSITGLYETRIDLSQLGGD

SEQ ID NO: 258 - protein, 1368 aa, Artificial Sequence
  Synthetic amino acid sequence
MDKKYSIGLDIGTNSVGWAVITDDYKVPSKKLKGLGNTDRHGIKKNLIGALLFDSGETAEATRLKRTARRRYTRRKNRICYLQEIFSNEMAKVDDSFFHRLEESFLVEEDKKHERHPIFGNIVDEVAYHEKYPTIYHLRKKLADSTDKVDLRLIYLALAHMIKFRGHFLIEGDLNPDNSDVDKLFIQLVQTYNQLFEENPINASRVDAKAILSARLSKSRRLENLIAQLPGEKKNGLFGNLIALSLGLTPNFKSNFDLAEDAKLQLSKDTYDDDLDNLLAQIGDQYADLFLAAKNLSDATLLSDILRVNSEITKAPLSASMIKRYDEHHQDLTLLKALVRQQLPEKYKEIFFDQSKNGYAGYIDGGASQEEFYKFIKPILEKMDGTEELLAKLNREDLLRKQRTFDNGSIPYQIHLGELHAILRRQEDFYPFLKDNREKIEKILTFRIPYYVGPLARGNSRFAWMTRKSEETITPWNFEEVVDKGASAQSFIERMTNFDKNLPNEKVLPKHSLLYEYFTVYNELTKVKYVTEGMRKPAFLSGEQKKAIVDLLFKTNRKVTVKQLKEDYFKKIECFDSVEISGVEDRFNASLGTYHDLLKIIKDKDFLDNEENEDILEDIVLTLTLFEDREMIEERLKTYAHLFDDKVMKQLKRRRYTGWGRLSRKLINGIRDKQSGKTILDFLKSDGFANRNFMQLIHDDSLTFKEDIQKAQVSGQGDSLHEHIANLAGSPAIKKGILQTVKVVDELVKVMGRHKPENIVIEMARENQTTQKGQKNSRERMKRIEEGIKELGSDILKEYPVENTQLQNEKLYLYYLQNGRDMYVDQELDINRLSDYDVDAIVPQSFLKDDSIDNKVLTRSDKNRGKSDNVPSEEVVKKMKNYWRQLLNAKLITQRKFDNLTKAERGGLSELDKVGFIKRQLVETRQITKHVAQILDSRMNTKYDENDKLIREVRVITLKSKLVSDFRKDFQFYKVREINNYHHAHDAYLNAVVGTALIKKYPKLESEFVYGDYKVYDVRKMIAKSEQEIGKATAKYFFYSNIMNFFKTEITLANGEIRKRPLIETNGETGEIVWDKGRDFATVRKVLSMPQVNIVKKTEVQTGGFSKESILPKRNSDKLIARKKDWDPKKYGGFDSPTVAYSVLVVAKVEKGKSKKLKSVKELLGITIMERSSFEKDPIDFLEAKGYKEVRKDLIIKLPKYSLFELENGRKRMLASAGELQKGNELALPSKYVNFLYLASHYEKLKGSPEDNEQKQLFVEQHKHYLDEIIEQISEFSKRVILADANLDKVLSAYNKHRDKPIREQAENIIHLFTLTNLGAPAAFKYFDTTIDRKRYTSTKEVLDATLIHQSITGLYETRIDLSQLGGD

SEQ ID NO: 259 - protein, 1368 aa, Artificial Sequence
  Synthetic amino acid sequence
MDKKYSIGLAIGTNSVGWAVITDDYKVPSKKLKGLGNTDRHGIKKNLIGALLFDSGETAEATRLKRTARRRYTRRKNRICYLQEIFSNEMAKVDDSFFHRLEESFLVEEDKKHERHPIFGNIVDEVAYHEKYPTIYHLRKKLADSTDKVDLRLIYLALAHMIKFRGHFLIEGDLNPDNSDVDKLFIQLVQTYNQLFEENPINASRVDAKAILSARLSKSRRLENLIAQLPGEKKNGLFGNLIALSLGLTPNFKSNFDLAEDAKLQLSKDTYDDDLDNLLAQIGDQYADLFLAAKNLSDATLLSDILRVNSEITKAPLSASMIKRYDEHHQDLTLLKALVRQQLPEKYKEIFFDQSKNGYAGYIDGGASQEEFYKFIKPILEKMDGTEELLAKLNREDLLRKQRTFDNGSIPYQIHLGELHAILRRQEDFYPFLKDNREKIEKILTFRIPYYVGPLARGNSRFAWMTRKSEETITPWNFEEVVDKGASAQSFIERMTNFDKNLPNEKVLPKHSLLYEYFTVYNELTKVKYVTEGMRKPAFLSGEQKKAIVDLLFKTNRKVTVKQLKEDYFKKIECFDSVEISGVEDRFNASLGTYHDLLKIIKDKDFLDNEENEDILEDIVLTLTLFEDREMIEERLKTYAHLFDDKVMKQLKRRRYTGWGRLSRKLINGIRDKQSGKTILDFLKSDGFANRNFMQLIHDDSLTFKEDIQKAQVSGQGDSLHEHIANLAGSPAIKKGILQTVKVVDELVKVMGRHKPENIVIEMARENQTTQKGQKNSRERMKRIEEGIKELGSDILKEYPVENTQLQNEKLYLYYLQNGRDMYVDQELDINRLSDYDVDAIVPQSFLKDDSIDNKVLTRSDKNRGKSDNVPSEEVVKKMKNYWRQLLNAKLITQRKFDNLTKAERGGLSELDKVGFIKRQLVETRQITKHVAQILDSRMNTKYDENDKLIREVRVITLKSKLVSDFRKDFQFYKVREINNYHHAHDAYLNAVVGTALIKKYPKLESEFVYGDYKVYDVRKMIAKSEQEIGKATAKYFFYSNIMNFFKTEITLANGEIRKRPLIETNGETGEIVWDKGRDFATVRKVLSMPQVNIVKKTEVQTGGFSKESILPKRNSDKLIARKKDWDPKKYGGFDSPTVAYSVLVVAKVEKGKSKKLKSVKELLGITIMERSSFEKDPIDFLEAKGYKEVRKDLIIKLPKYSLFELENGRKRMLASAGELQKGNELALPSKYVNFLYLASHYEKLKGSPEDNEQKQLFVEQHKHYLDEIIEQISEFSKRVILADANLDKVLSAYNKHRDKPIREQAENIIHLFTLTNLGAPAAFKYFDTTIDRKRYTSTKEVLDATLIHQSITGLYETRIDLSQLGGD

SEQ ID NO: 260 - protein, 15 aa, Artificial Sequence
  Synthetic amino acid sequence
IGLDIGTNSVGWAVI

SEQ ID NO: 261 - protein, 8 aa, Artificial Sequence
  Synthetic amino acid sequence
IVIEMARE

SEQ ID NO: 262 - protein, 27 aa, Artificial Sequence
  Synthetic amino acid sequence
DVDHIVPQSFLKDDSIDNKVLTRSDKN

SEQ ID NO: 263 - protein, 8 aa, Artificial Sequence
  Synthetic amino acid sequence
HHAHDAYL

SEQ ID NO: 264 - protein, 11 aa, Artificial Sequence
  Synthetic amino acid sequence
YGRKKRRQRRR

SEQ ID NO: 265 - protein, 12 aa, Artificial Sequence
  Synthetic amino acid sequence
RRQRRTSKLMKR

SEQ ID NO: 266 - protein, 27 aa, Artificial Sequence
  Synthetic amino acid sequence
GWTLNSAGYLLGKINLKALAALAKKIL

SEQ ID NO: 267 - protein, 33 aa, Artificial Sequence
  Synthetic amino acid sequence
KALAWEAKLAKALAKALAKHLAKALAKALKCEA

SEQ ID NO: 268 - protein, 16 aa, Artificial Sequence
  Synthetic amino acid sequence
RQIKIWFQNRRMKWKK

SEQ ID NO: 269 - protein, 9 aa, Artificial Sequence
  Synthetic amino acid sequence
RKKRRQRRR

SEQ ID NO: 270 - protein, 8 aa, Artificial Sequence
  Synthetic amino acid sequence
RKKRRQRR

SEQ ID NO: 271 - protein, 11 aa, Artificial Sequence
  Synthetic amino acid sequence
YARAAARQARA

SEQ ID NO: 272 - protein, 11 aa, Artificial Sequence
  Synthetic amino acid sequence
THRLPRRRRRR

SEQ ID NO: 273 - protein, 11 aa, Artificial Sequence
  Synthetic amino acid sequence
GGRRARRRRRR

SEQ ID NO: 274 - protein, 13 aa, Artificial Sequence
  Synthetic amino acid sequence
DAYPYDVPDYASL

SEQ ID NO: 275 - protein, 17 aa, Artificial Sequence
  Synthetic amino acid sequence
PKKKRKVEDPKKKRKVD

SEQ ID NO: 276 - DNA, 4206 bp, Artificial Sequence
  Synthetic nucleic acid sequence
atggacaagaagtacagcatcggcctggacatcggcaccaactctgtgggctgggccgtgatcaccgacgagtacaaggtgcccagcaagaaattcaaggtgctgggcaacaccgaccggcacagcatcaagaagaacctgatcggcgccctgctgttcgacagcggagaaacagccgaggccacccggctgaagagaaccgccagaagaagatacaccagacggaagaaccggatctgctatctgcaagagatcttcagcaacgagatggccaaggtggacgacagcttcttccacagactggaagagtccttcctggtggaagaggataagaagcacgagcggcaccccatcttcggcaacatcgtggacgaggtggcctaccacgagaagtaccccaccatctaccacctgagaaagaaactggtggacagcaccgacaaggccgacctgcggctgatctatctggccctggcccacatgatcaagttccggggccacttcctgatcgagggcgacctgaaccccgacaacagcgacgtggacaagctgttcatccagctggtgcagacctacaaccagctgttcgaggaaaaccccatcaacgccagcggcgtggacgccaaggccatcctgtctgccagactgagcaagagcagacggctggaaaatctgatcgcccagctgcccggcgagaagaagaatggcctgttcggcaacctgattgccctgagcctgggcctgacccccaacttcaagagcaacttcgacctggccgaggatgccaaactgcagctgagcaaggacacctacgacgacgacctggacaacctgctggcccagatcggcgaccagtacgccgacctgtttctggccgccaagaacctgtccgacgccatcctgctgagcgacatcctgagagtgaacaccgagatcaccaaggcccccctgagcgcctctatgatcaagagatacgacgagcaccaccaggacctgaccctgctgaaagctctcgtgcggcagcagctgcctgagaagtacaaagagattttcttcgaccagagcaagaacggctacgccggctacatcgatggcggagccagccaggaagagttctacaagttcatcaagcccatcctggaaaagatggacggcaccgaggaactgctcgtgaagctgaacagagaggacctgctgcggaagcagcggaccttcgacaacggcagcatcccccaccagatccacctgggagagctgcacgccattctgcggcggcaggaagatttttacccattcctgaaggacaaccgggaaaagatcgagaagatcctgaccttccgcatcccctactacgtgggccctctggccaggggaaacagcagattcgcctggatgaccagaaagagcgaggaaaccatcaccccctggaacttcgaggaagtggtggacaagggcgccagcgcccagagcttcatcgagcggatgaccaacttcgataagaacctgcccaacgagaaggtgctgcccaagcacagcctgctgtacgagtacttcaccgtgtacaacgagctgaccaaagtgaaatacgtgaccgagggaatgagaaagcccgccttcctgagcggcgagcagaaaaaagccatcgtggacctgctgttcaagaccaaccggaaagtgaccgtgaagcagctgaaagaggactacttcaagaaaatcgagtgcttcgactccgtggaaatctccggcgtggaagatcggttcaacgcctccctgggcacataccacgatctgctgaaaattatcaaggacaaggacttcctggacaatgaggaaaacgaggacattctggaagatatcgtgctgaccctgacactgtttgaggacagagagatgatcgaggaacggctgaaaacctatgcccacctgttcgacgacaaagtgatgaagcagctgaagcggcggagatacaccggctggggcaggctgagccggaagctgatcaacggcatccgggacaagcagtccggcaagacaatcctggatttcctgaagtccgacggcttcgccaacagaaacttcatgcagctgatccacgacgacagcctgacctttaaagaggacatccagaaagcccaggtgtccggccagggcgatagcctgcacgagcacattgccaatctggccggcagccccgccattaagaagggcatcctgcagacagtgaaggtggtggacgagctcgtgaaagtgatgggccggcacaagcccgagaacatcgtgatcgaaatggccagagagaaccagaccacccagaagggacagaagaacagccgcgagagaatgaagcggatcgaagagggcatcaaagagctgggcagccagatcctgaaagaacaccccgtggaaaacacccagctgcagaacgagaagctgtacctgtactacctgcagaatgggcgggatatgtacgtggaccaggaactggacatcaaccggctgtccgactacgatgtggaccatatcgtgcctcagagctttctgaaggacgactccatcgataacaaagtgctgactcggagcgacaagaaccggggcaagagcgacaacgtgccctccgaagaggtcgtgaagaagatgaagaactactggcgccagctgctgaatgccaagctgattacccagaggaagttcgacaatctgaccaaggccgagagaggcggcctgagcgaactggataaggccggcttcatcaagagacagctggtggaaacccggcagatcacaaagcacgtggcacagatcctggactcccggatgaacactaagtacgacgagaacgacaaactgatccgggaagtgaaagtgatcaccctgaagtccaagctggtgtccgatttccggaaggatttccagttttacaaagtgcgcgagatcaacaactaccaccacgcccacgacgcctacctgaacgccgtcgtgggaaccgccctgatcaaaaagtaccctaagctggaaagcgagttcgtgtacggcgactacaaggtgtacgacgtgcggaagatgatcgccaagagcgagcaggaaatcggcaaggctaccgccaagtacttcttctacagcaacatcatgaactttttcaagaccgagattaccctggccaacggcgagatccggaagcggcctctgatcgagacaaacggcgaaacaggcgagatcgtgtgggataagggccgggactttgccaccgtgcggaaagtgctgtctatgccccaagtgaatatcgtgaaaaagaccgaggtgcagacaggcggcttcagcaaagagtctatcctgcccaagaggaacagcgacaagctgatcgccagaaagaaggactgggaccctaagaagtacggcggcttcgacagccccaccgtggcctattctgtgctggtggtggccaaagtggaaaagggcaagtccaagaaactgaagagtgtgaaagagctgctggggatcaccatcatggaaagaagcagcttcgagaagaatcccatcgactttctggaagccaagggctacaaagaagtgaaaaaggacctgatcatcaagctgcctaagtactccctgttcgagctggaaaacggccggaagagaatgctggcctctgccggcgaactgcagaagggaaacgaactggccctgccctccaaatatgtgaacttcctgtacctggccagccactatgagaagctgaagggctcccccgaggataatgagcagaaacagctgtttgtggaacagcacaaacactacctggacgagatcatcgagcagatcagcgagttctccaagagagtgatcctggccgacgctaatctggacaaggtgctgagcgcctacaacaagcacagagacaagcctatcagagagcaggccgagaatatcatccacctgtttaccctgaccaatctgggagcccctgccgccttcaagtactttgacaccaccatcgaccggaagaggtacaccagcaccaaagaggtgctggacgccaccctgatccaccagagcatcaccggcctgtacgagacacggatcgacctgtctcagctgggaggcgacgcctatccctatgacgtgcccgattatgccagcctgggcagcggctcccccaagaaaaaacgcaaggtggaagatcctaagaaaaagcggaaagtggactga

SEQ ID NO: 277 - protein, 1401 aa, Artificial Sequence; identical to SEQ ID NO: 256
  Synthetic amino acid sequence

SEQ ID NO: 278 - DNA, 50 bp, Artificial Sequence
  Synthetic nucleic acid sequence
ttatatgaacataactcaatttgtaaaaaagggtattggggaattcatta

SEQ ID NO: 279 - DNA, 50 bp, Artificial Sequence
  Synthetic nucleic acid sequence
taatgaattccccaatacccttttttacaaattgagttatgttcatataa

SEQ ID NO: 280 - RNA, 42 nt, Artificial Sequence
  Synthetic nucleic acid sequence
auaacucaauuuguaaaaaaguuuuagagcuaugcuguuuug

SEQ ID NO: 281 - DNA, 27 bp, Artificial Sequence
  Synthetic nucleic acid sequence
aacataactcaatttgtaaaaaagggt

SEQ ID NO: 282 - DNA, 27 bp, Artificial Sequence
  Synthetic nucleic acid sequence
acccttttttacaaattgagttatgtt

SEQ ID NO: 283 - RNA, 25 nt, Artificial Sequence
  Synthetic nucleic acid sequence
auaacucaauuuguaaaaaaguuuu

SEQ ID NO: 284 - DNA, 23 bp, Artificial Sequence
  Synthetic nucleic acid sequence
agcataactcaatttgtaaaaaa

SEQ ID NO: 285 - DNA, 23 bp, Artificial Sequence
  Synthetic nucleic acid sequence
aacataactcaatctgtaaaaaa

SEQ ID NO: 286 - DNA, 23 bp, Artificial Sequence
  Synthetic nucleic acid sequence
aacataactcaatttgaaaaaaa

SEQ ID NO: 287 - DNA, 23 bp, Artificial Sequence
  Synthetic nucleic acid sequence
aacataactcaatttgttaaaaa

SEQ ID NO: 288 - DNA, 23 bp, Artificial Sequence
  Synthetic nucleic acid sequence
aacataactcaatttgtataaaa

SEQ ID NO: 289 - DNA, 23 bp, Artificial Sequence
  Synthetic nucleic acid sequence
aacataactcaatttgtaataaa

SEQ ID NO: 290 - DNA, 23 bp, Artificial Sequence
  Synthetic nucleic acid sequence
aacataactcaatttgtaaataa

SEQ ID NO: 291 - DNA, 27 bp, Artificial Sequence
  Synthetic nucleic acid sequence
aacataactcaatttgtaaaaaatggc

SEQ ID NO: 292 - DNA, 27 bp, Artificial Sequence
  Synthetic nucleic acid sequence
gccattttttacaaattgagttatgtt

SEQ ID NO: 293 - DNA, 20 bp, Artificial Sequence
  Synthetic nucleic acid sequence
tattgagttaaagtaaaaaa

SEQ ID NO: 294 - DNA, 20 bp, Artificial Sequence
  Synthetic nucleic acid sequence
tattgagttattgtaaaaaa

SEQ ID NO: 295 - DNA, 20 bp, Artificial Sequence
  Synthetic nucleic acid sequence
tattgagtatttgtaaaaaa

SEQ ID NO: 296 - DNA, 20 bp, Artificial Sequence
  Synthetic nucleic acid sequence
tattgacaatttgtaaaaaa

SEQ ID NO: 297 - DNA, 20 bp, Artificial Sequence
  Synthetic nucleic acid sequence
tattctcaatttgtaaaaaa

SEQ ID NO: 298 - DNA, 20 bp, Artificial Sequence
  Synthetic nucleic acid sequence
taaactcaatttgtaaaaaa

SEQ ID NO: 299 - RNA, 62 nt, Artificial Sequence
  Synthetic nucleic acid sequence
aaaaauuaggugcgcuuggcguuuuagagcuagaaauagcaaguuaaaauaaggcuaguccg

SEQ ID NO: 300 - RNA, 54 nt, Artificial Sequence
  Synthetic nucleic acid sequence
aaaaauuaggugcgcuuggcguuuuagagcuagaaauagcaaguuaaaauaagg

SEQ ID NO: 301 - DNA, 50 bp, Artificial Sequence
  Synthetic nucleic acid sequence
tgcgctggttgatttcttcttgcgctttttgggtattggggaattcatta

SEQ ID NO: 302 - DNA, 50 bp, Artificial Sequence
  Synthetic nucleic acid sequence
taatgaattccccaatacccaaaaagcgcaagaagaaatcaaccagcgca

SEQ ID NO: 303 - RNA, 42 nt, Artificial Sequence
  Synthetic nucleic acid sequence
gauuucuucuugcgcuuuuuguuuuagagcuaugcuguuuug

SEQ ID NO: 304 - DNA, 50 bp, Artificial Sequence
  Synthetic nucleic acid sequence
ggttatattaagtgccgaggaaaaattaggtgcgcttggctggcgcatta

SEQ ID NO: 305 - DNA, 50 bp, Artificial Sequence
  Synthetic nucleic acid sequence
taatgcgccagccaagcgcacctaatttttcctcggcacttaatataacc

SEQ ID NO: 306 - RNA, 42 nt, Artificial Sequence
  Synthetic nucleic acid sequence
aaaaauuaggugcgcuuggcguuuuagagcuaugcuguuuug

SEQ ID NO: 307 - DNA, 50 bp, Artificial Sequence
  Synthetic nucleic acid sequence
tacgctggttgatttcttcttgcgcttttttggctttttcgagttcggct

SEQ ID NO: 308 - DNA, 50 bp, Artificial Sequence
  Synthetic nucleic acid sequence
agccgaactcgaaaaagccaaaaaagcgcaagaagaaatcaaccagcgta

SEQ ID NO: 309 - RNA, 42 nt, Artificial Sequence; identical to SEQ ID NO: 303
  Synthetic nucleic acid sequence

SEQ ID NO: 310 - DNA, 14 bp, Artificial Sequence
  Synthetic nucleic acid sequence
taatgcgccagcca

SEQ ID NO: 311 - RNA, 42 nt, Artificial Sequence; identical to SEQ ID NO: 306
  Synthetic nucleic acid sequence

SEQ ID NO: 312 - DNA, 25 bp, Artificial Sequence
  Synthetic nucleic acid sequence
ataactcaatttgtaaaaaagggta

SEQ ID NO: 313 - DNA, 25 bp, Artificial Sequence
  Synthetic nucleic acid sequence
ataactcaatttgtaaaaaagcgta

SEQ ID NO: 314 - DNA, 25 bp, Artificial Sequence
  Synthetic nucleic acid sequence
ataactcaatttgtaaaaaagccta

SEQ ID NO: 315 - DNA, 26 bp, Artificial Sequence
  Synthetic nucleic acid sequence
aaaaattaggtgcgcttggctggcgc

SEQ ID NO: 316 - DNA, 26 bp, Artificial Sequence
  Synthetic nucleic acid sequence
aaaaattaggtgcgcttggctcgcgc

SEQ ID NO: 317 - DNA, 26 bp, Artificial Sequence
  Synthetic nucleic acid sequence
aaaaattaggtgcgcttggctgccgc

SEQ ID NO: 318 - DNA, 26 bp, Artificial Sequence
  Synthetic nucleic acid sequence
aaaaattaggtgcgcttggctggccc

SEQ ID NO: 319 - DNA, 26 bp, Artificial Sequence
  Synthetic nucleic acid sequence
aaaaattaggtgcgcttggctccccc

SEQ ID NO: 320 - DNA, 21 bp, Artificial Sequence
  Synthetic nucleic acid sequence
aaaaattaggtgcgcttggct

SEQ ID NO: 321 - RNA, 62 nt, Artificial Sequence
  Synthetic nucleic acid sequence
gauuucuucuugcgcuuuuuguuuuagagcuagaaauagcaaguuaaaauaaggcuaguccg

SEQ ID NO: 322 - RNA, 54 nt, Artificial Sequence
  Synthetic nucleic acid sequence
gauuucuucuugcgcuuuuuguuuuagagcuagaaauagcaaguuaaaauaagg

SEQ ID NO: 323 - RNA, 62 nt, Artificial Sequence
  Synthetic nucleic acid sequence
auaacucaauuuguaaaaaaguuuuagagcuagaaauagcaaguuaaaauaaggcuaguccg

SEQ ID NO: 324 - RNA, 54 nt, Artificial Sequence
  Synthetic nucleic acid sequence
auaacucaauuuguaaaaaaguuuuagagcuagaaauagcaaguuaaaauaagg

SEQ ID NO: 325 - DNA, 120 bp, Artificial Sequence
  Synthetic nucleic acid sequence
gtcccaattcttgttgaattagatggtgatgttaatgggcacaaattttctgtcagtggagagggtgaaggtgatgcaacatacggaaaacttacccttaaatttatttgcactactgga

SEQ ID NO: 326 - DNA, 120 bp, Artificial Sequence
  Synthetic nucleic acid sequence
tccagtagtgcaaataaatttaagggtaagttttccgtatgttgcatcaccttcaccctctccactgacagaaaatttgtgcccattaacatcaccatctaattcaacaagaattgggac

SEQ ID NO: 327 - DNA, 26 bp, Artificial Sequence
  Synthetic nucleic acid sequence
ccaattcttgttgaattagatggtga

SEQ ID NO: 328 - DNA, 26 bp, Artificial Sequence
  Synthetic nucleic acid sequence
aattagatggtgatgttaatgggcac

SEQ ID NO: 329 - DNA, 26 bp, Artificial Sequence
  Synthetic nucleic acid sequence
aaattttctgtcagtggagagggtga

SEQ ID NO: 330 - DNA, 26 bp, Artificial Sequence
  Synthetic nucleic acid sequence
catctaattcaacaagaattgggaca

SEQ ID NO: 331 - DNA, 26 bp, Artificial Sequence
  Synthetic nucleic acid sequence
cagtagtgcaaataaatttaagggta

SEQ ID NO: 332 - RNA, 68 nt, Artificial Sequence
  Synthetic nucleic acid sequence
ccaauucuuguugaauuagauggugaguuuuagagcuagaaauagcaaguuaaaauaaggcuaguccg

SEQ ID NO: 333 - RNA, 68 nt, Artificial Sequence
  Synthetic nucleic acid sequence
aauuagauggugauguuaaugggcacguuuuagagcuagaaauagcaaguuaaaauaaggcuaguccg

SEQ ID NO: 334 - RNA, 68 nt, Artificial Sequence
  Synthetic nucleic acid sequence
aaauuuucugucaguggagagggugaguuuuagagcuagaaauagcaaguuaaaauaaggcuaguccg

SEQ ID NO: 335 - RNA, 68 nt, Artificial Sequence
  Synthetic nucleic acid sequence
caucuaauucaacaagaauugggacaguuuuagagcuagaaauagcaaguuaaaauaaggcuaguccg

SEQ ID NO: 336 - RNA, 68 nt, Artificial Sequence
  Synthetic nucleic acid sequence
caguagugcaaauaaauuuaaggguaguuuuagagcuagaaauagcaaguuaaaauaaggcuaguccg

SEQ ID NO: 337 - DNA, 50 bp, Artificial Sequence
  Synthetic nucleic acid sequence
ggttatattaagtgccgaggaaaaattaggtgcgcttggctgccgcatta

SEQ ID NO: 338 - DNA, 50 bp, Artificial Sequence
  Synthetic nucleic acid sequence
taatgcggcagccaagcgcacctaatttttcctcggcacttaatataacc

SEQ ID NO: 339 - RNA, 42 nt, Artificial Sequence; identical to SEQ ID NO: 306
  Synthetic nucleic acid sequence

SEQ ID NO: 340 - DNA, 59 bp, Artificial Sequence
  Synthetic nucleic acid sequence
gaaattaatacgactcactatagaaaacagcatagcaagttaaaataaagttaaaataa

SEQ ID NO: 341 - DNA, 25 bp, Artificial Sequence
  Synthetic nucleic acid sequence
aaaaaaagcaccgactcggtgccac

SEQ ID NO: 342 - DNA, 66 bp, Artificial Sequence
  Synthetic nucleic acid sequence
gaaattaatacgactcactatagggatttcttcttgcgctttttgttttagagctatgctgttttg

SEQ ID NO: 343 - DNA, 66 bp, Artificial Sequence
  Synthetic nucleic acid sequence
caaaacagcatagctctaaaacaaaaagcgcaagaagaaatccctatagtgagtcgtattaatttc

SEQ ID NO: 344 - DNA, 66 bp, Artificial Sequence
  Synthetic nucleic acid sequence
gaaattaatacgactcactataggataactcaatttgtaaaaaagttttagagctatgctgttttg

SEQ ID NO: 345 - DNA, 66 bp, Artificial Sequence
  Synthetic nucleic acid sequence
caaaacagcatagctctaaaacttttttacaaattgagttatcctatagtgagtcgtattaatttc

SEQ ID NO: 346 - DNA, 51 bp, Artificial Sequence
  Synthetic nucleic acid sequence
gaaattaatacgactcactatagatgatgagaaccgttgctacaataaggc

SEQ ID NO: 347 - DNA, 24 bp, Artificial Sequence
  Synthetic nucleic acid sequence
aaataaacgatgccccttaaagca

SEQ ID NO: 348 - DNA, 68 bp, Artificial Sequence
  Synthetic nucleic acid sequence
gaaattaatacgactcactatagatgataactcaatttgtaaaaaagttgtagctccctttctcattt

SEQ ID NO: 349 - DNA, 68 bp, Artificial Sequence
  Synthetic nucleic acid sequence
aaatgagaaagggagctacaacttttttacaaattgagttatcatctatagtgagtcgtattaatttc

SEQ ID NO: 350 - DNA, 51 bp, Artificial Sequence
  Synthetic nucleic acid sequence
gaaattaatacgactcactatagatgaaataacatagcaagttaaaataag

SEQ ID NO: 351 - DNA, 31 bp, Artificial Sequence
  Synthetic nucleic acid sequence
aaaaaaagcgccgaaacagcgctacttaatt

SEQ ID NO: 352 - DNA, 68 bp, Artificial Sequence
  Synthetic nucleic acid sequence
gaaattaatacgactcactatagatgataactcaatttgtaaaaaagttttagagctatgttattttg

SEQ ID NO: 353 - DNA, 68 bp, Artificial Sequence
  Synthetic nucleic acid sequence
caaaataacatagctctaaaacttttttacaaattgagttatcatctatagtgagtcgtattaatttc

SEQ ID NO: 354 - DNA, 35 bp, Artificial Sequence
  Synthetic nucleic acid sequence
atgcacctgcaggatgctgttaaataattgtatac

SEQ ID NO: 355 - DNA, 36 bp, Artificial Sequence
  Synthetic nucleic acid sequence
atgcacggatccagctgctctaagtctactaaaacc

SEQ ID NO: 356 - DNA, 39 bp, Artificial Sequence
  Synthetic nucleic acid sequence
atgcagggccggccgtgacagagagaaacttgattcaac

SEQ ID NO: 357 - DNA, 39 bp, Artificial Sequence
  Synthetic nucleic acid sequence
atgcagggccggcccttcgtttaagtaaacatcaaagtg

SEQ ID NO: 358 - DNA, 59 bp, Artificial Sequence
  Synthetic nucleic acid sequence
atgagcgataatagaataaagttatatgagcataactcaatttgtaaaaaagggtattg

SEQ ID NO: 359 - DNA, 59 bp, Artificial Sequence
  Synthetic nucleic acid sequence
caatacccttttttacaaattgagttatgctcatataactttattctattatcgctcat

SEQ ID NO: 360 - DNA, 57 bp, Artificial Sequence
  Synthetic nucleic acid sequence
gcgataatagaataaagttatatgaacataactcaatctgtaaaaaagggtattggg

SEQ ID NO: 361 - DNA, 57 bp, Artificial Sequence
  Synthetic nucleic acid sequence
cccaatacccttttttacagattgagttatgttcatataactttattctattatcgc

SEQ ID NO: 362 - DNA, 40 bp, Artificial Sequence
  Synthetic nucleic acid sequence
gaacataactcaatttgaaaaaaagggtattggggaattc

SEQ ID NO: 363 - DNA, 40 bp, Artificial Sequence
  Synthetic nucleic acid sequence
gaattccccaataccctttttttcaaattgagttatgttc

SEQ ID NO: 364 - DNA, 40 bp, Artificial Sequence
  Synthetic nucleic acid sequence
gaacataactcaatttgttaaaaagggtattggggaattc

SEQ ID NO: 365 - DNA, 40 bp, Artificial Sequence
  Synthetic nucleic acid sequence
gaattccccaataccctttttaacaaattgagttatgttc

SEQ ID NO: 366 - DNA, 43 bp, Artificial Sequence
  Synthetic nucleic acid sequence
gaacataactcaatttgtataaaagggtattggggaattcatt

SEQ ID NO: 367 - DNA, 43 bp, Artificial Sequence
  Synthetic nucleic acid sequence
aatgaattccccaatacccttttatacaaattgagttatgttc

SEQ ID NO: 368 - DNA, 43 bp, Artificial Sequence
  Synthetic nucleic acid sequence
gaacataactcaatttgtaataaagggtattggggaattcatt

SEQ ID NO: 369 - DNA, 43 bp, Artificial Sequence
  Synthetic nucleic acid sequence
aatgaattccccaataccctttattacaaattgagttatgttc

SEQ ID NO: 370 - DNA, 40 bp, Artificial Sequence
  Synthetic nucleic acid sequence
cataactcaatttgtaaataagggtattggggaattcatt

SEQ ID NO: 371 - DNA, 40 bp, Artificial Sequence
  Synthetic nucleic acid sequence
aatgaattccccaatacccttatttacaaattgagttatg

SEQ ID NO: 372 - DNA, 46 bp, Artificial Sequence
  Synthetic nucleic acid sequence
cataactcaatttgtaaaaaagcgtattggggaattcattataaag

SEQ ID NO: 373 - DNA, 46 bp, Artificial Sequence
  Synthetic nucleic acid sequence
ctttataatgaattccccaatacgcttttttacaaattgagttatg

SEQ ID NO: 374 - DNA, 44 bp, Artificial Sequence
  Synthetic nucleic acid sequence
cataactcaatttgtaaaaaagcctattggggaattcattataa

SEQ ID NO: 375 - DNA, 44 bp, Artificial Sequence
  Synthetic nucleic acid sequence
ttataatgaattccccaataggcttttttacaaattgagttatg

SEQ ID NO: 376 - DNA, 38 bp, Artificial Sequence
  Synthetic nucleic acid sequence
atgcagggccggccagtatcagcgtacttggatttggg

SEQ ID NO: 377 - DNA, 37 bp, Artificial Sequence
  Synthetic nucleic acid sequence
atgcagggccggccttgtctcactcactctatttttg

SEQ ID NO: 378 - DNA, 30 bp, Artificial Sequence
  Synthetic nucleic acid sequence
gatttcttgcgcttttttggctttttcgag

SEQ ID NO: 379 - DNA, 30 bp, Artificial Sequence
  Synthetic nucleic acid sequence
gggatggcaatccatgggtcaaggtactag

SEQ ID NO: 380 - DNA, 20 bp, Artificial Sequence
  Synthetic nucleic acid sequence
ggaacgaaaactcacgttaa

SEQ ID NO: 381 - DNA, 25 bp, Artificial Sequence
  Synthetic nucleic acid sequence
tgagagtgtcttttcagatgctgtg

SEQ ID NO: 382 - DNA, 21 bp, Artificial Sequence
  Synthetic nucleic acid sequence
agcggtatctgttccccaaaa

SEQ ID NO: 383 - DNA, 21 bp, Artificial Sequence
  Synthetic nucleic acid sequence
gttaaaaaccacgtaaccaca

SEQ ID NO: 384 - RNA, 42 nt, Artificial Sequence; identical to SEQ ID NO: 303
  Synthetic nucleic acid sequence

SEQ ID NO: 385 - RNA, 42 nt, Artificial Sequence; identical to SEQ ID NO: 280
  Synthetic nucleic acid sequence

SEQ ID NO: 386 - RNA, 42 nt, Artificial Sequence; identical to SEQ ID NO: 306
  Synthetic nucleic acid sequence

SEQ ID NO: 387 - RNA, 36 nt, Artificial Sequence
  Synthetic nucleic acid sequence
auaacucaauuuguaaaaaaguuuuagagcuaugcu

SEQ ID NO: 388 - RNA, 32 nt, Artificial Sequence
  Synthetic nucleic acid sequence
auaacucaauuuguaaaaaaguuuuagagcua

SEQ ID NO: 389 - RNA, 22 nt, Artificial Sequence
  Synthetic nucleic acid sequence
uuguaaaaaaguuuuagagcua

SEQ ID NO: 390 - RNA, 89 nt, Artificial Sequence
  Synthetic nucleic acid sequence
guuggaaccauucaaaacagcauagcaaguuaaaauaaggcuaguccguuaucaacuugaaaaaguggcaccgagucggugcuuuuuuu

SEQ ID NO: 391 - RNA, 74 nt, Artificial Sequence
  Synthetic nucleic acid sequence
aacagcauagcaaguuaaaauaaggcuaguccguuaucaacuugaaaaaguggcaccgagucggugcuuuuuuu

SEQ ID NO: 392 - RNA, 67 nt, Artificial Sequence
  Synthetic nucleic acid sequence
uagcaaguuaaaauaaggcuaguccguuaucaacuugaaaaaguggcaccgagucggugcuuuuuuu

SEQ ID NO: 393 - RNA, 39 nt, Artificial Sequence
  Synthetic nucleic acid sequence
aaacagcauagcaaguuaaaauaaggcuaguccguuauc

SEQ ID NO: 394 - RNA, 30 nt, Artificial Sequence
  Synthetic nucleic acid sequence
aaacagcauagcaaguuaaaauaaggcuag

SEQ ID NO: 395 - RNA, 22 nt, Artificial Sequence
  Synthetic nucleic acid sequence
aaacagcauagcaaguuaaaau

SEQ ID NO: 396 - RNA, 31 nt, Artificial Sequence
  Synthetic nucleic acid sequence
uagcaaguuaaaauaaggcuaguccguuauc

SEQ ID NO: 397 - RNA, 26 nt, Artificial Sequence
  Synthetic nucleic acid sequence
uagcaaguuaaaauaaggcuaguccg

SEQ ID NO: 398 - RNA, 22 nt, Artificial Sequence
  Synthetic nucleic acid sequence
uagcaaguuaaaauaaggcuag

SEQ ID NO: 399 - RNA, 26 nt, Artificial Sequence
  Synthetic nucleic acid sequence
guuggaaccauucaaaacagcauagc

SEQ ID NO: 400 - RNA, 62 nt, Artificial Sequence; identical to SEQ ID NO: 321
  Synthetic nucleic acid sequence

SEQ ID NO: 401 - RNA, 54 nt, Artificial Sequence; identical to SEQ ID NO: 322
  Synthetic nucleic acid sequence

SEQ ID NO: 402 - RNA, 62 nt, Artificial Sequence; identical to SEQ ID NO: 323
  Synthetic nucleic acid sequence

SEQ ID NO: 403 - RNA, 54 nt, Artificial Sequence; identical to SEQ ID NO: 324
  Synthetic nucleic acid sequence

SEQ ID NO: 404 - RNA, 62 nt, Artificial Sequence; identical to SEQ ID NO: 299
  Synthetic nucleic acid sequence

SEQ ID NO: 405 - RNA, 54 nt, Artificial Sequence; identical to SEQ ID NO: 300
  Synthetic nucleic acid sequence

SEQ ID NO: 406 - RNA, 62 nt, Artificial Sequence
  Synthetic nucleic acid sequence
ccaauucuuguugaauuagaguuuuagagcuagaaauagcaaguuaaaauaaggcuaguccg

SEQ ID NO: 407 - RNA, 62 nt, Artificial Sequence
  Synthetic nucleic acid sequence
aauuagauggugauguuaauguuuuagagcuagaaauagcaaguuaaaauaaggcuaguccg

SEQ ID NO: 408 - RNA, 62 nt, Artificial Sequence
  Synthetic nucleic acid sequence
aaauuuucugucaguggagaguuuuagagcuagaaauagcaaguuaaaauaaggcuaguccg

SEQ ID NO: 409 - RNA, 62 nt, Artificial Sequence
  Synthetic nucleic acid sequence
caucuaauucaacaagaauuguuuuagagcuagaaauagcaaguuaaaauaaggcuaguccg

SEQ ID NO: 410 - RNA, 61 nt, Artificial Sequence
  Synthetic nucleic acid sequence
caguagugcaaauaaauuuaguuuuagagcuagaaauagcaaguuaaaauaaggcuagccg

SEQ ID NO: 411 - DNA, 50 bp, Artificial Sequence; identical to SEQ ID NO: 302
  Synthetic nucleic acid sequence

SEQ ID NO: 412 - DNA, 50 bp, Artificial Sequence; identical to SEQ ID NO: 301
  Synthetic nucleic acid sequence

SEQ ID NO: 413 - DNA, 50 bp, Artificial Sequence; identical to SEQ ID NO: 279
  Synthetic nucleic acid sequence

SEQ ID NO: 414 - DNA, 50 bp, Artificial Sequence; identical to SEQ ID NO: 278
  Synthetic nucleic acid sequence

SEQ ID NO: 415 - DNA, 50 bp, Artificial Sequence; identical to SEQ ID NO: 305
  Synthetic nucleic acid sequence

SEQ ID NO: 416 - DNA, 50 bp, Artificial Sequence; identical to SEQ ID NO: 304
  Synthetic nucleic acid sequence

SEQ ID NO: 417 - DNA, 50 bp, Artificial Sequence
  Synthetic nucleic acid sequence
taatgaattccccaataggcttttttacaaattgagttatgttcatataa

SEQ ID NO: 418 - DNA, 50 bp, Artificial Sequence
  Synthetic nucleic acid sequence
ttatatgaacataactcaatttgtaaaaaagcctattggggaattcatta

SEQ ID NO: 419 - DNA, 50 bp, Artificial Sequence
  Synthetic nucleic acid sequence
taatgaattcccgttatggcttttttacaaattgagttatgttcatataa

SEQ ID NO: 420 - DNA, 50 bp, Artificial Sequence
  Synthetic nucleic acid sequence
ttatatgaacataactcaatttgtaaaaaagccataacgggaattcatta

SEQ ID NO: 421 - DNA, 50 bp, Artificial Sequence
  Synthetic nucleic acid sequence
taatgcgcgagccaagcgcacctaatttttcctcggcacttaatataacc

SEQ ID NO: 422 - DNA, 50 bp, Artificial Sequence
  Synthetic nucleic acid sequence
ggttatattaagtgccgaggaaaaattaggtgcgcttggctcgcgcatta

SEQ ID NO: 423 - DNA, 50 bp, Artificial Sequence; identical to SEQ ID NO: 338
  Synthetic nucleic acid sequence

SEQ ID NO: 424 - DNA, 50 bp, Artificial Sequence; identical to SEQ ID NO: 337
  Synthetic nucleic acid sequence

SEQ ID NO: 425 - DNA, 74 bp, Artificial Sequence
  Synthetic nucleic acid sequence
tcagtcctcatctccctcaagcaggccccgctggtgcactgaagagccaccctgtggaaacactacatctgcaa

SEQ ID NO: 426 - DNA, 74 bp, Artificial Sequence
  Synthetic nucleic acid sequence
ttgcagatgtagtgtttccacagggtggctcttcagtgcaccagcggggcctgcttgagggagatgaggactga

SEQ ID NO: 427 - DNA, 20 bp, Artificial Sequence
  Synthetic nucleic acid sequence
tgtggaaacactacatctgc

SEQ ID NO: 428 - RNA, 62 nt, Artificial Sequence
  Synthetic nucleic acid sequence
gcagauguaguguuuccacaguuuuagagcuagaaauagcaaguuaaaauaaggcuaguccg

SEQ ID NO: 429 - RNA, 75 nt, Artificial Sequence
  Synthetic nucleic acid sequence
gcagauguaguguuuccacaguuuuagagcuaugcugaaaagcauagcaaguuaaaauaaggcuaguccguuauc

SEQ ID NO: 430 - RNA, 87 nt, Artificial Sequence
  Synthetic nucleic acid sequence
gcagauguaguguuuccacaguuuuagagcuaugcuguuuuggaaacaaaacagcauagcaaguuaaaauaaggcuaguccguuauc

SEQ ID NO: 431 - RNA, 86 nt, Artificial Sequence
  Synthetic nucleic acid sequence
ggaaccauucaaaacagcauagcaaguuaaaauaaggcuaguccguuaucaacuugaaaaaguggcaccgagucggugcuuuuuuu

SEQ ID NO: 432 - RNA, 67 nt, Artificial Sequence; identical to SEQ ID NO: 392
  Synthetic nucleic acid sequence

SEQ ID NO: 433 - RNA, 88 nt, Streptococcus pyogenes
guuggaaccauucaaaacagcauagcaaguuaaaauaaggcuaguccguuaucaacuugaaaaaguggcaccgagucggugcuuuuuu

SEQ ID NO: 434 - RNA, 93 nt, Listeria innocua
auauuguuaguauucaaaauaacauagcaaguuaaaauaaggcuuuguccguuaucaacuuuuaauuaaguagcgcuguuucggcgcuuuuuu

SEQ ID NO: 435 - RNA, 104 nt, Streptococcus mutans
uguuggaaucauucgaaacaacacagcaaguuaaaauaaggcagugauuuuuaauccaguccguacacaacuugaaaaagugcgcaccgauucggugcuuuuuu

SEQ ID NO: 436 - RNA, 95 nt, Streptococcus thermophilus
uugugguuugaaaccauucgaaacaacacagcgaguuaaaauaaggcuuaguccguacucaacuugaaaagguggcaccgauucgguguuuuuuu

SEQ ID NO: 437 - RNA, 118 nt, Streptococcus thermophilus
uaauaauaguguaagggacgccuuacacaguuacuuaaaucuugcagaagcuacaaagauaaggcuucaugccgaaaucaacacccugucauuuuauggcaggguguuuucguuauuu

SEQ ID NO: 438 - RNA, 112 nt, Neisseria meningitidis
cauauugucgcacugcgaaaugagaaccguugcuacaauaaggccgucugaaaagaugugccgcaacgcucugccccuuaaagcuucugcuuuaaggggcaucguuuauuuc

SEQ ID NO: 439 - RNA, 110 nt, Pasteurella multocida
gcauauuguugcacugcgaaaugagagacguugcuacaauaaggcuucugaaaagaaugaccguaacgcucugccccuugugauucuuaauugcaaggggcaucguuuuu

SEQ ID NO: 440 - RNA, 115 nt, Mycoplasma mobile
uauuauguauuucgaaauacagauguacaguuaagaauacauaagaaugauacaucacuaaaaaaaggcuuuaugccguaacuacuacuuauuuucaaaauaaguaguuuuuuuu

SEQ ID NO: 441 - RNA, 26 nt, Artificial Sequence
  Synthetic nucleic acid sequence
uagcaaguuaaaauaaggcuaguccg

SEQ ID NO: 442 - RNA, 36 nt, Streptococcus pyogenes
uuguuggaaccauucaaaacagcauagcaaguuaaa

SEQ ID NO: 443 - RNA, 36 nt, Streptococcus mutans
guguuggaaucauucgaaacaacacagcaaguuaaa

SEQ ID NO: 444 - RNA, 36 nt, Streptococcus thermophilus
gguuugaaaccauucgaaacaacacagcgaguuaaa

SEQ ID NO: 445 - RNA, 36 nt, Streptococcus thermophilus
cuuacacaguuacuuaaaucuugcagaagcuacaaa

SEQ ID NO: 446 - RNA, 36 nt, Listeria innocua
auauuguuaguauucaaaauaacauagcaaguuaaa

SEQ ID NO: 447 - RNA, 34 nt, Listeria innocua
auuguuaguauucaaaauaacauagcaaguuaaa

SEQ ID NO: 448 - RNA, 36 nt, Treponema denticola
auuuaagauccaucuuaaauuacacaacgaguucaa

SEQ ID NO: 449 - RNA, 36 nt, Neisseria meningitidis
auugucgcacugcgaaaugagaaccguugcuacaau

SEQ ID NO: 450 - RNA, 38 nt, Neisseria meningitidis
auauugucgcacugcgaaaugagaaccguugcuacaau

SEQ ID NO: 451 - RNA, 36 nt, Streptococcus gordonii; identical to SEQ ID NO: 445

SEQ ID NO: 452 - RNA, 36 nt, Bifidobacterium bifidum
augaucaaggucauugaccugacaggcauaaauuga

SEQ ID NO: 453 - RNA, 36 nt, Lactobacillus salivarius
gguuuugaccucauugauuuaacauucugaguugaa

SEQ ID NO: 454 - RNA, 37 nt, Francisella tularensis
guuucaguuguuagauuauuugguauguacuuguguu

SEQ ID NO: 455 - RNA, 37 nt, Francisella tularensis
auuacagagcauuaauuauuugguacauuuauaauuu

SEQ ID NO: 456 - RNA, 37 nt, Legionella pneumophila
auuucaggguaucgaaauuuagaugauuucuaauuua

SEQ ID NO: 457 - RNA, 36 nt, Nitratifractor salsuginis
uguaacaggguaggguuuuuugaggggucuuaaaau

SEQ ID NO: 458 - RNA, 36 nt, Butyrivibrio fibrisolvens
aguuucuaaucacuuaauuuuuucggaccuacuaaa

SEQ ID NO: 459 - RNA, 36 nt, Streptobacillus moniliformis
gauucacauuauucaaguuuacuacagauucuguau

SEQ ID NO: 460 - RNA, 36 nt, Mycoplasma mobile
aguuaagaauacauaagaaugauacaucacuaaaaa

SEQ ID NO: 461 - RNA, 44 nt, Capnocytophaga ochracea
auugugaauugcuuucaaauugugcgacaaaaguagguauaaua

SEQ ID NO: 462 - RNA, 36 nt, Acidovorax ebreus
auugcagcaacggcucucaccccggauaaccacaau

SEQ ID NO: 463 - RNA, 36 nt, Wolinella succinogenes
auagccgcugccuacucagccauuuagcgcagcgac

SEQ ID NO: 464 - RNA, 37 nt, Wolinella succinogenes
uuuguuaaagcuggaugggauuauuauagaguguugc

SEQ ID NO: 465 - RNA, 37 nt, Wolinella succinogenes
uuucaaggcaucgaacggauuugcuauaaaguguugc

SEQ ID NO: 466 - RNA, 36 nt, Prevotella ruminicola
uuuugcacacguaagauuccuacaucuuaucacaau

SEQ ID NO: 467 - RNA, 48 nt, Fibrobacter succinogenes
auugugaauugcuuucagauuaugaaaauaauauaguuaaaauuuuug

SEQ ID NO: 468 - RNA, 36 nt, Campylobacter jejuni
auuuuauuucgauuuuaaucaacccuaaauuucaau

SEQ ID NO: 469 - RNA, 36 nt, Campylobacter jejuni
auuuuagucccuuuuuaaauuucuuaugagauuaua

SEQ ID NO: 470 - RNA, 25 nt, Campylobacter jejuni
aagaaauuuaaaaagggacuaaaau

SEQ ID NO: 471 - RNA, 36 nt, Pasteurella multocida
auuguagcaacgucucucauuucgcagugcaacaau

SEQ ID NO: 472 - RNA, 36 nt, Rhodopseudomonas palustris
gccguggcuuuccuaccgauuucccaccgcaugauu

SEQ ID NO: 473 - RNA, 36 nt, Olsenella uli
ucugaauuaccagucagaacgauacugcgagucaaa

SEQ ID NO: 474 - RNA, 36 nt, Rhodospirillum rubrum
guuccauggccccgucccacacgccaugauagagcg

SEQ ID NO: 475 - RNA, 36 nt, Rhodospirillum rubrum
aaacgggagaaccgucccacacggccaugguagagu

SEQ ID NO: 476 - RNA, 36 nt, Dinoroseobacter shibae
uuaacggcucgaccgcgaauucugaacguaaagaca

SEQ ID NO: 477 - RNA, 36 nt, Verminephrobacter eiseniae
uuagcguccagagcgcauaucccagugagauauccg

SEQ ID NO: 478 - RNA, 75 nt, Streptococcus pyogenes
aaacagcauagcaaguuaaaauaaggcuaguccguuaucaacuugaaaaaguggcaccgagucggugcuuuuuuu

SEQ ID NO: 479 - RNA, 77 nt, Listeria innocua
aaauaacauagcaaguuaaaauaaggcuuuguccguuaucaacuuuuaauuaaguagcgcuguuucggcgcuuuuuu

SEQ ID NO: 480 - RNA, 73 nt, Artificial Sequence
  Synthetic nucleic acid sequence
aacagcauagcaaguuaaaauaaggcuaguccguuaucaacuugaaaaaguggcaccgagucggugcuuuuuu

SEQ ID NO: 481 - RNA, 33 nt, Francisella novicida
uauaaauguaccaaauaauuaaugcucuguaau

SEQ ID NO: 482 - RNA, 74 nt, Campylobacter jejuni
aagaaauuuaaaaagggacuaaaauaaagaguuugcgggacucugcgggguuacaauccccuaaaaccgcuuuu

SEQ ID NO: 483 - RNA, 96 nt, Francisella novicida
aucuaaaauuauaaauguaccaaauaauuaaugcucuguaaucauuuaaaaguauuuugaacggaccucuguuugacacgucugaauaacuaaaaa

SEQ ID NO: 484 - RNA, 109 nt, Streptococcus thermophilus2
uguaagggacgccuuacacaguuacuuaaaucuugcagaagcuacaaagauaaggcuucaugccgaaaucaacacccugucauuuuauggcaggguguuuucguuauuu

SEQ ID NO: 485 - RNA, 110 nt, Mycoplasma mobile
uguauuucgaaauacagauguacaguuaagaauacauaagaaugauacaucacuaaaaaaaggcuuuaugccguaacuacuacuuauuuucaaaauaaguaguuuuuuuu

SEQ ID NO: 486 - RNA, 92 nt, Listeria innocua
auuguuaguauucaaaauaacauagcaaguuaaaauaaggcuuuguccguuaucaacuuuuaauuaaguagcgcuguuucggcgcuuuuuuu

SEQ ID NO: 487 - RNA, 89 nt, Streptococcus pyogenes; identical to SEQ ID NO: 390

SEQ ID NO: 488 - RNA, 107 nt, Streptococcus mutans
guuggaaucauucgaaacaacacagcaaguuaaaauaaggcagugauuuuuaauccaguccguacacaacuugaaaaagugcgcaccgauucggugcuuuuuuauuu

SEQ ID NO: 489 - RNA, 96 nt, Streptococcus thermophilus
uugugguuugaaaccauucgaaacaacacagcgaguuaaaauaaggcuuaguccguacucaacuugaaaagguggcaccgauucgguguuuuuuuu

SEQ ID NO: 490 - RNA, 102 nt, Neisseria meningitidis
acauauugucgcacugcgaaaugagaaccguugcuacaauaaggccgucugaaaagaugugccgcaacgcucugccccuuaaagcuucugcuuuaaggggca

SEQ ID NO: 491 - RNA, 110 nt, Pasteurella multocida; identical to SEQ ID NO: 439

SEQ ID NO: 492 - RNA, 37 nt, Francisella novicida
aacacaaguacauaccaaauaaucuaacaacugaaac

SEQ ID NO: 493 - RNA, 37 nt, Francisella novicida
aaauuauaaauguaccaaauaauuaaugcucuguaau

SEQ ID NO: 494 - RNA, 37 nt, Wolinella succinogenes; identical to SEQ ID NO: 465

SEQ ID NO: 495 - RNA, 37 nt, Wolinella succinogenes; identical to SEQ ID NO: 464

SEQ ID NO: 496 - RNA, 37 nt, gamma proteobacterium
auuucaguguauagaauguugggaugcauucugaaua

SEQ ID NO: 497 - RNA, 37 nt, gamma proteobacterium
auaacaagggaguauuugcuggaauaagcucugaaac

SEQ ID NO: 498 - RNA, 37 nt, Sutterella wadsworthensis
guuuccaagcaauagcucguggcguuaugauuucugu

SEQ ID NO: 499 - RNA, 37 nt, Sutterella wadsworthensis
ggugauuuccuauagcucauagcguuaugaucucuaa

SEQ ID NO: 500 - RNA, 37 nt, Legionella pneumophila; identical to SEQ ID NO: 456

SEQ ID NO: 501 - RNA, 36 nt, Listeria innocua; identical to SEQ ID NO: 446

SEQ ID NO: 502 - RNA, 36 nt, Streptococcus thermophilus; identical to SEQ ID NO: 444

SEQ ID NO: 503 - RNA, 36 nt, Streptococcus mutans; identical to SEQ ID NO: 443

SEQ ID NO: 504 - RNA, 36 nt, Streptococcus pyogenes; identical to SEQ ID NO: 442

SEQ ID NO: 505 - RNA, 36 nt, Fusobacterium nucleatum
auuuuuaauuuaaguaauaaaaaauggagcauauac

SEQ ID NO: 506 - RNA, 36 nt, Filifactor alocis
aguugacuaccauaugagauuacacuacacgguuca

SEQ ID NO: 507 - RNA, 36 nt, Treponema denticola; identical to SEQ ID NO: 448

SEQ ID NO: 508 - RNA, 36 nt, Solobacterium moorei
cuuauaccaguaagauaauuuacauaguaaguucaa

SEQ ID NO: 509 - RNA, 36 nt, Veillonella atypica
guuuuggagguuuacagaauuacacuacgaguucaa

SEQ ID NO: 510 - RNA, 36 nt, Finegoldia magna
guuuaauaccuauaugagauuacaucaugaguucaa

SEQ ID NO: 511 - RNA, 36 nt, Olsenella uli; identical to SEQ ID NO: 473

SEQ ID NO: 512 - RNA, 36 nt, Lactobacillus rhamnosus
caacuugaauugauugaucugacaucuacgaguuga

SEQ ID NO: 513 - RNA, 36 nt, Lactobacillus gasseri
ugauuagauuucauugaucuaacagccaucuaaaac

SEQ ID NO: 514 - RNA, 36 nt, Lactobacillus gasseri
acacuaaacuuuauugaucuaacaaccagauuuaaa

SEQ ID NO: 515 - RNA, 36 nt, Oenococcus kitaharae
ggguucuaccucauugaucugacacacagcauugaa

SEQ ID NO: 516 - RNA, 36 nt, Bifidobacterium bifidum; identical to SEQ ID NO: 452

SEQ ID NO: 517 - RNA, 36 nt, Staphylococcus pseudintermedius
guuuuacuucuuucuaaauaaacauaguuaaguuaa

SEQ ID NO: 518 - RNA, 36 nt, Eubacterium rectale
auuuuauagucacguaaauuuuucagaucuacuaaa

SEQ ID NO: 519 - RNA, 38 nt, Enterococcus faecalis
auuuuacugauaagaaauuauugagaaucuacaaaaau

SEQ ID NO: 520 - RNA, 36 nt, Streptococcus thermophilus; identical to SEQ ID NO: 445

SEQ ID NO: 521 - RNA, 36 nt, Staphylococcus lugdunensis
cuuguacuuauaccuaaaauuacagaaucuacugaa

SEQ ID NO: 522 - RNA, 36 nt, Eubacterium dolichum
aucauaaucuagcaaaaguuuauaugaucuaacaaa

SEQ ID NO: 523 - RNA, 36 nt, Mycoplasma mobile; identical to SEQ ID NO: 460

SEQ ID NO: 524 - RNA, 36 nt, Mycoplasma ovipneumoniae
auuuuacucuaguaagaaauugucgcacaaaaauaa

SEQ ID NO: 525 - RNA, 36 nt, Mycoplasma gallisepticum
auuauugcuuacacaauuauugucgugcuaaaauaa

SEQ ID NO: 526 - RNA, 36 nt, Mycoplasma canis
auuauuguuuacccaaauauuguacauccuaaauca

SEQ ID NO: 527 - RNA, 36 nt, Mycoplasma synoviae
uacuuacuuaacaaaauaauuguacgauuccaaaau

SEQ ID NO: 528 - RNA, 36 nt, Aminomonas paucivorans
gccuucccucccugccgaaggagcagauccucuccu

SEQ ID NO: 529 - RNA, 36 nt, Clostridium perfringens
uuauaguaacuaguuaaacucucgauaugcuauacc

SEQ ID NO: 530 - RNA, 36 nt, Clostridium cellulolyticum
auuauagcaacaauucaggcuccgauaugccauaau

SEQ ID NO: 531 - RNA, 36 nt, Acidovorax ebreus; identical to SEQ ID NO: 462

SEQ ID NO: 532 - RNA, 36 nt, Neisseria meningitidis; identical to SEQ ID NO: 449

SEQ ID NO: 533 - RNA, 36 nt, Pasteurella multocida
auuguugcacugcgaaaugagagacguugcuacaau

SEQ ID NO: 534 - RNA, 36 nt, phylotype Rs-D17
uuuguaacuuaucugagagaggaugguuauuauaau

SEQ ID NO: 535 - RNA, 36 nt, Wolinella succinogenes; identical to SEQ ID NO: 463

SEQ ID NO: 536 - RNA, 36 nt, Campylobacter jejuni
auaauacaaaaaucauuuuuuuaaacaaacauaaac

SEQ ID NO: 537 - RNA, 36 nt, Campylobacter jejuni
uauaaucucauaagaaauuuaaaaagggacuaaaau

SEQ ID NO: 538 - RNA, 36 nt, Helicobacter mustelae
guauuugucaauaaauauacuuuauaauggcaagau

SEQ ID NO: 539 - RNA, 36 nt, Roseburia intestinalis
uuguaauaaccuaauuaucacuugguaugauauaau

SEQ ID NO: 540 - RNA, 36 nt, Lactobacillus coryniformis
uuuuauucuauaguaaguuuucagcuaaaauagauc

SEQ ID NO: 541 - RNA, 36 nt, Rhodopseudomonas palustris; identical to SEQ ID NO: 472

SEQ ID NO: 542 - RNA, 36 nt, Cand. Puniceispirillum marinum
uaaccauaggcuccucaaucaccagaguguuauugc

SEQ ID NO: 543 - RNA, 36 nt, Verminephrobacter eiseniae; identical to SEQ ID NO: 477

SEQ ID NO: 544 - RNA, 36 nt, Ralstonia syzygii
guuaguagcaaagcgcaauucccgaucugcuggaaa

SEQ ID NO: 545 - RNA, 36 nt, Unknown
  Azospirillum sp. B510
uuaacggcuggacccccgauccccaucgaauuucca

SEQ ID NO: 546 - RNA, 36 nt, Dinoroseobacter shibae; identical to SEQ ID NO: 476

SEQ ID NO: 547 - RNA, 36 nt, Rhodospirillum rubrum; identical to SEQ ID NO: 474

SEQ ID NO: 548 - RNA, 36 nt, Rhodospirillum rubrum; identical to SEQ ID NO: 475

SEQ ID NO: 549 - RNA, 36 nt, Unknown
  Sphaerochaeta globus str. Buddy
auuagagauaaucgcugguuuuuguuaagauauaac

SEQ ID NO: 550 - RNA, 36 nt, Prevotella ruminicola; identical to SEQ ID NO: 466

SEQ ID NO: 551 - RNA, 36 nt, Flavobacterium columnare
agauaaaauuauucuaaucuuuaaucuuaucacaau

SEQ ID NO: 552 - RNA, 36 nt, Parvibaculum lavamentivorans
cuugcgaaaagcgaccgccucucgauuugcuacaga

SEQ ID NO: 553 - RNA, 44 nt, Capnocytophaga ochracea; identical to SEQ ID NO: 461

SEQ ID NO: 554 - RNA, 48 nt, Fibrobacter succinogenes; identical to SEQ ID NO: 467

SEQ ID NO: 555 - RNA, 36 nt, Nitratifractor salsuginis; identical to SEQ ID NO: 457

SEQ ID NO: 556 - RNA, 36 nt, Akkermansia muciniphila
cuuauacgggaacuccacgauaaggcauuuuacaug

SEQ ID NO: 557 - RNA, 88 nt, Artificial Sequence
  Synthetic nucleic acid sequence
uuggaaccauucaaaacagcauagcaaguuaaaauaaggcuaguccguuaucaacuugaaaaaguggcaccgagucggugcuuuuuuu

SEQ ID NO: 558 - RNA, 77 nt, Artificial Sequence
  Synthetic nucleic acid sequence
caaaacagcauagcaaguuaaaauaaggcuaguccguuaucaacuugaaaaaguggcaccgagucggugcuuuuuuu

SEQ ID NO: 559 - RNA, 61 nt, Artificial Sequence
  Synthetic nucleic acid sequence
caaaacagcauagcaaguuaaaauaaggcuaguccguuaucaacuugaaaaaguuuuuuuu

SEQ ID NO: 560 - RNA, 44 nt, Artificial Sequence
  Synthetic nucleic acid sequence
caaaacagcauagcaaguuaaaauaaggcuaguccguuuuuuuu

SEQ ID NO: 561 - RNA, 72 nt, Artificial Sequence
  Synthetic nucleic acid sequence
caaaacagcauagcaaguuaaaauaaggcuaguccgguucacugccguauaggcagcuaagaaauuuuuuuu

SEQ ID NO: 562 - RNA, 14 nt, Artificial Sequence
  Synthetic nucleic acid sequence
uagcaaguuaaaau

SEQ ID NO: 563 - RNA, 102 nt, Artificial Sequence
  Synthetic nucleic acid sequence
  misc_feature (1)..(80): n at each of these positions can be present or absent such that this region can contain anywhere from 12 to 80 nucleotides. n is a, c, g, or u
nnnnnnnnnnnnnnnnnnnnnnnnnnnnnnnnnnnnnnnnnnnnnnnnnnnnnnnnnnnnnnnnnnnnnnnnnnnnnnnnguuuuagagcuaugcuguuuug

SEQ ID NO: 564 - RNA, 102 nt, Artificial Sequence
  Synthetic nucleic acid sequence
  misc_feature (1)..(80): n at each of these positions can be present or absent such that this region can contain anywhere from 12 to 80 nucleotides. n is a, c, g, or u
nnnnnnnnnnnnnnnnnnnnnnnnnnnnnnnnnnnnnnnnnnnnnnnnnnnnnnnnnnnnnnnnnnnnnnnnnnnnnnnnguuuuagagcuauguuauuuug

SEQ ID NO: 565 - RNA, 92 nt, Artificial Sequence
  Synthetic nucleic acid sequence
  misc_feature (1)..(80): n at each of these positions can be present or absent such that this region can contain anywhere from 12 to 80 nucleotides. n is a, c, g, or u
nnnnnnnnnnnnnnnnnnnnnnnnnnnnnnnnnnnnnnnnnnnnnnnnnnnnnnnnnnnnnnnnnnnnnnnnnnnnnnnnguuuuagagcua

SEQ ID NO: 566 - RNA, 152 nt, Artificial Sequence
  Synthetic nucleic acid sequence
  misc_feature (37)..(116): n at each of these positions can be present or absent such that this region can contain anywhere from 12 to 80 nucleotides. n is a, c, g, or u
guuuuagagcuaugcuguuuugaauggucccaaaacnnnnnnnnnnnnnnnnnnnnnnnnnnnnnnnnnnnnnnnnnnnnnnnnnnnnnnnnnnnnnnnnnnnnnnnnnnnnnnnnguuuuagagcuaugcuguuuugaauggucccaaaac

SEQ ID NO: 567 - RNA, 188 nt, Artificial Sequence
  Synthetic nucleic acid sequence
  misc_feature (37)..(116): n at each of these positions can be present or absent such that this region can contain anywhere from 12 to 80 nucleotides. n is a, c, g, or u
guuuuagagcuaugcuguuuugaauggucccaaaacnnnnnnnnnnnnnnnnnnnnnnnnnnnnnnnnnnnnnnnnnnnnnnnnnnnnnnnnnnnnnnnnnnnnnnnnnnnnnnnnguuuuagagcuaugcuguuuugaauggucccaaaacguuuuagagcuaugcuguuuugaauggucccaaaac

SEQ ID NO: 568 - RNA, 22 nt, Artificial Sequence
  Synthetic nucleic acid sequence
guuuuagagcuaugcuguuuug

SEQ ID NO: 569 - RNA, 36 nt, Streptococcus pyogenes
guuuuagagcuaugcuguuuugaauggucccaaaac

SEQ ID NO: 570 - RNA, 36 nt, Pasteurella multocida
guuguaguucccucucucauuucgcagugcuacaau

SEQ ID NO: 571 - RNA, 36 nt, Mycoplasma mobile
guuuugguguaguaucauucuuauguauucuuaaac

SEQ ID NO: 572 - RNA, 37 nt, Francisella novicida
guuucaguugcugaauuauuugguaaacuacuguuag

SEQ ID NO: 573 - RNA, 33 nt, Francisella novicida
guuucaguugcugaauuauuugguaaacuacug

SEQ ID NO: 574 - RNA, 36 nt, Streptococcus mutans
guuuuagagcuguguuguuucgaaugguuccaaaac

SEQ ID NO: 575 - RNA, 36 nt, Streptococcus thermophilus; identical to SEQ ID NO: 574

SEQ ID NO: 576 - RNA, 36 nt, Streptococcus thermophilus
guuuuuguacucucaagauuuaaguaacuguacaac

SEQ ID NO: 577 - RNA, 36 nt, Listeria innocua
guuuuagagcuauguuauuuugaaugcuaacaaaac

SEQ ID NO: 578 - RNA, 36 nt, Treponema denticola
guuugagaguuguguaauuuaagauggaucucaaac

SEQ ID NO: 579 - RNA, 36 nt, Neisseria meningitidis
guuguagcucccuuucucauuucgcagugcuacaau

SEQ ID NO: 580 - RNA, 36 nt, Streptococcus gordonii; identical to SEQ ID NO: 576

SEQ ID NO: 581 - RNA, 35 nt, Bifidobacterium bifidum
guuucaaugccugucagaucaaugacuuugaccac

SEQ ID NO: 582 - RNA, 36 nt, Lactobacillus salivarius
guuucagaaguauguuaaaucaauaagguuaagacc

SEQ ID NO: 583 - RNA, 37 nt, Francisella tularensis
cuaacaguaguuuaccaaauaauucagcaacugaaac

SEQ ID NO: 584 - RNA, 37 nt, Francisella tularensis; identical to SEQ ID NO: 583

SEQ ID NO: 585 - RNA, 37 nt, Legionella pneumophila
ccaauaaucccucaucuaaaaauccaaccacugaaac

SEQ ID NO: 586 - RNA, 36 nt, Nitratifractor salsuginis
guuuuaagaccccucaaaaccccacccuguuacaau

SEQ ID NO: 587 - RNA, 36 nt, Butyrivibrio fibrisolvens
guuuuaguacccgggaaaauuaagugauuggaaaac

SEQ ID NO: 588 - RNA, 36 nt, Streptobacillus moniliformis
gauacagauucuugguaaauuugaauaaugugaaug

SEQ ID NO: 589 - RNA, 36 nt, Mycoplasma mobile; identical to SEQ ID NO: 571

SEQ ID NO: 590 - RNA, 44 nt, Capnocytophaga ochracea
uguuaucaaucgcaaaacuacaaaauuugaaagcaauucacaac

SEQ ID NO: 591 - RNA, 36 nt, Acidovorax ebreus
aguguagcuauccggggugagagagggagcuacaac

SEQ ID NO: 592 - RNA, 36 nt, Wolinella succinogenes
auuauagcgaggaauggcugaguaggcggcuauaac

SEQ ID NO: 593 - RNA, 37 nt, Wolinella succinogenes
gcaacacuuuauagcaaauccgcuuagccugugaaac

SEQ ID NO: 594 - RNA, 37 nt, Wolinella succinogenes; identical to SEQ ID NO: 593

SEQ ID NO: 595 - RNA, 36 nt, Prevotella ruminicola
guugugguuugauguaggaaaggaaugauauacaac

SEQ ID NO: 596 - RNA, 48 nt, Fibrobacter succinogenes
guuguuauugcacuaguaaaacuagaaaaucugaaagcaauucacaac

SEQ ID NO: 597 - RNA, 36 nt, Campylobacter jejuni
auuuuaccauaaagaaauuuaaaaagggacuaaaac

SEQ ID NO: 598 - RNA, 36 nt, Campylobacter jejuni
guuuuagucccuuuuuaaauuucuuuaugguaaaau

SEQ ID NO: 599 - RNA, 36 nt, Pasteurella multocida
auuguagcacugcgaaaugagagagggaacuacaac

SEQ ID NO: 600 - RNA, 36 nt, Rhodopseudomonas palustris
agccuaccacggggaaaucgguagggaagccacggc

SEQ ID NO: 601 - RNA, 36 nt, Olsenella uli
guuuuggggcagugucguuuugacugguaaucaaac

SEQ ID NO: 602 - RNA, 36 nt, Rhodospirillum rubrum
acucuaccauggcggugugggacggggccauggaac

SEQ ID NO: 603 - RNA, 36 nt, Rhodospirillum rubrum; identical to SEQ ID NO: 602

SEQ ID NO: 604 - RNA, 36 nt, Dinoroseobacter shibae
aguuuagcuguucagaauucgggguccagccgcaac

SEQ ID NO: 605 - RNA, 36 nt, Verminephrobacter eiseniae
auuguagcucacugggauaugcgcacuggccggaac

SEQ ID NO: 606 - RNA, 37 nt, Francisella novicida; identical to SEQ ID NO: 572

SEQ ID NO: 607 - RNA, 37 nt, Francisella novicida; identical to SEQ ID NO: 572

SEQ ID NO: 608 - RNA, 37 nt, Wolinella succinogenes; identical to SEQ ID NO: 593

SEQ ID NO: 609 - RNA, 37 nt, Wolinella succinogenes; identical to SEQ ID NO: 593

SEQ ID NO: 610 - RNA, 37 nt, gamma proteobacterium
guuucagagcuuaucccaacaaaccaacagcugaaac

SEQ ID NO: 611 - RNA, 37 nt, gamma proteobacterium; identical to SEQ ID NO: 610

SEQ ID NO: 612 - RNA, 37 nt, Sutterella wadsworthensis
gcgaagaucauaacgcuacgagcuauagcacugaaac

SEQ ID NO: 613 - RNA, 37 nt, Sutterella wadsworthensis; identical to SEQ ID NO: 612

SEQ ID NO: 614 - RNA, 37 nt, Legionella pneumophila; identical to SEQ ID NO: 585

SEQ ID NO: 615 - RNA, 36 nt, Listeria innocua; identical to SEQ ID NO: 577

SEQ ID NO: 616 - RNA, 36 nt, Streptococcus thermophilus; identical to SEQ ID NO: 574

SEQ ID NO: 617 - RNA, 36 nt, Streptococcus mutans; identical to SEQ ID NO: 574

SEQ ID NO: 618 - RNA, 36 nt, Streptococcus pyogenes; identical to SEQ ID NO: 569

SEQ ID NO: 619 - RNA, 36 nt, Fusobacterium nucleatum
guuugagaguaauguuauuuuaaauagauucaaaac

SEQ ID NO: 620 - RNA, 36 nt, Filifactor alocis
guuugagaguaguguaauuucauaugguagucaaac

SEQ ID NO: 621 - RNA, 36 nt, Treponema denticola; identical to SEQ ID NO: 578

SEQ ID NO: 622 - RNA, 36 nt, Solobacterium moorei
guuugagaacuauguaaauuaugcugguagcaaaac

SEQ ID NO: 623 - RNA, 36 nt, Veillonella atypica
guuugcgaguaguguaauucuguaaaucucuaaaac

SEQ ID NO: 624 - RNA, 36 nt, Finegoldia magna
guuugagaaugauguaauuucauauagguauuaaac

SEQ ID NO: 625 - RNA, 36 nt, Olsenella uli; identical to SEQ ID NO: 601

SEQ ID NO: 626 - RNA, 36 nt, Lactobacillus rhamnosus
gucucagguagaugucagaucaaucaguucaagagc

SEQ ID NO: 627 - RNA, 36 nt, Lactobacillus gasseri
guuuuagaugguuguuagaucaauaagguuuagauc

SEQ ID NO: 628 - RNA, 36 nt, Lactobacillus gasseri; identical to SEQ ID NO: 627

SEQ ID NO: 629 - RNA, 36 nt, Oenococcus kitaharae
gcuucagaugugugucagaucaaugagguagaaccc

SEQ ID NO: 630 - RNA, 36 nt, Bifidobacterium bifidum
guuucagaugccugucagaucaaugacuuugaccac

SEQ ID NO: 631 - RNA, 36 nt, Staphylococcus pseudintermedius
guuuuagcacuauguuuauuuagaaagagguaaaac

SEQ ID NO: 632 - RNA, 36 nt, Eubacterium rectale
auuuuaguaacugaauaauuuacgugacuguaaaac

SEQ ID NO: 633 - RNA, 36 nt, Enterococcus faecalis
guuuuuguauucucaauaauuucuuaucaguaaaac

SEQ ID NO: 634 - RNA, 36 nt, Streptococcus thermophilus; identical to SEQ ID NO: 576

SEQ ID NO: 635 - RNA, 36 nt, Staphylococcus lugdunensis
guuuuaguacucuguaauuuuagguauaagugauac

SEQ ID NO: 636 - RNA, 36 nt, Eubacterium dolichum
guuuuguuaccauauggauuuuugcuagauuaagac

SEQ ID NO: 637 - RNA, 36 nt, Mycoplasma mobile; identical to SEQ ID NO: 571

SEQ ID NO: 638 - RNA, 36 nt, Mycoplasma ovipneumoniae
guuuuugugcuguacaauuucuuacuagaguaaaac

SEQ ID NO: 639 - RNA, 36 nt, Mycoplasma gallisepticum
guuuuagcacuguacaauacuuguguaagcaauaac

SEQ ID NO: 640 - RNA, 36 nt, Mycoplasma canis
guuuuaguguuguacaauauuuggguaaacaauaac

SEQ ID NO: 641 - RNA, 36 nt, Mycoplasma synoviae
guuuugggguuguacaauuauuuuguuaaguaaaac

SEQ ID NO: 642 - RNA, 36 nt, Aminomonas paucivorans
agcauagcauuucggagugcggcagggagcuaugac

SEQ ID NO: 643 - RNA, 36 nt, Clostridium perfringens
auuauagcauaucgagaauuuacuaggaacuauaac

SEQ ID NO: 644 - RNA, 36 nt, Clostridium cellulolyticum
auuauagcauaucggagccugaauuggagcuauaac

SEQ ID NO: 645 - RNA, 36 nt, Acidovorax ebreus; identical to SEQ ID NO: 591

SEQ ID NO: 646 - RNA, 36 nt, Neisseria meningitidis; identical to SEQ ID NO: 579

SEQ ID NO: 647 - RNA, 36 nt, Pasteurella multocida; identical to SEQ ID NO: 570

SEQ ID NO: 648 - RNA, 36 nt, Unknown
  uncultured Termite group 1 bacterium phylotype Rs-D17
guuauaguuuccuuccucucucagaugugcuauaau

SEQ ID NO: 649 - RNA, 36 nt, Wolinella succinogenes; identical to SEQ ID NO: 592

SEQ ID NO: 650 - RNA, 36 nt, Campylobacter jejuni; identical to SEQ ID NO: 598

SEQ ID NO: 651 - RNA, 36 nt, Campylobacter jejuni; identical to SEQ ID NO: 598

SEQ ID NO: 652 - RNA, 36 nt, Helicobacter mustelae
auuuuagcauaaacauauuuaugaaguggcuaaaac

SEQ ID NO: 653 - RNA, 36 nt, Roseburia intestinalis
auuauaccauaccaagugauaacagggaauuacaac

SEQ ID NO: 654 - RNA, 36 nt, Lactobacillus coryniformis
gaucuauuuuagcugaaaacugaaggaaucaauagc

SEQ ID NO: 655 - RNA, 36 nt, Rhodopseudomonas palustris; identical to SEQ ID NO: 600

SEQ ID NO: 656 - RNA, 36 nt, Cand. Puniceispirillum marinum
aguauagcacucuggugauugagagccuagagcaac

SEQ ID NO: 657 - RNA, 36 nt, Verminephrobacter eiseniae; identical to SEQ ID NO: 605

SEQ ID NO: 658 - RNA, 36 nt, Ralstonia syzygii
agguuagcagaucgggaauugcgcucuggcuacaac

SEQ ID NO: 659 - RNA, 36 nt, Unknown
  Azospirillum sp. B510
aguguagccgauggggaucggggguccagccgcaac

SEQ ID NO: 660 - RNA, 36 nt, Dinoroseobacter shibae; identical to SEQ ID NO: 604

SEQ ID NO: 661 - RNA, 36 nt, Rhodospirillum rubrum; identical to SEQ ID NO: 602

SEQ ID NO: 662 - RNA, 36 nt, Rhodospirillum rubrum; identical to SEQ ID NO: 602

SEQ ID NO: 663 - RNA, 36 nt, Unknown
  Sphaerochaeta globus str. Buddy
ggucaaucuuaacaaaaaucagcggucauccccaac

SEQ ID NO: 664 - RNA, 36 nt, Prevotella ruminicola; identical to SEQ ID NO: 595

SEQ ID NO: 665 - RNA, 36 nt, Flavobacterium columnare
guugugguuugauuaaagauuagaaaacacgauauu

SEQ ID NO: 666 - RNA, 36 nt, Parvibaculum lavamentivorans
agaguagcaaaucgagagacggccgcaauccgcagc

SEQ ID NO: 667 - RNA, 44 nt, Capnocytophaga ochracea; identical to SEQ ID NO: 590

SEQ ID NO: 668 - RNA, 48 nt, Fibrobacter succinogenes; identical to SEQ ID NO: 596

SEQ ID NO: 669 - RNA, 36 nt, Nitratifractor salsuginis; identical to SEQ ID NO: 586

SEQ ID NO: 670 - RNA, 36 nt, Akkermansia muciniphila
guuguacugugccuuauuuuggauucaaggcaaaac

SEQ ID NO: 671 - RNA, 44 nt, Artificial Sequence
  Synthetic nucleic acid sequence
guuuuagagcuagaaauagcaaguuaaaauaaggcuaguccguu

SEQ ID NO: 672 - RNA, 60 nt, Artificial Sequence
  Synthetic nucleic acid sequence
  misc_feature (13)..(17): n is a, c, g, or u
guuuuagagcuannnnnuagcaaguuaaaauaaguuaaaauaaggcuaguccguuaucaa

SEQ ID NO: 673 - RNA, 68 nt, Artificial Sequence
  Synthetic nucleic acid sequence
guuuuagagcuaugcugaaaagcauagcaaguuaaaaauaaguuaaaauaaggcuaguccguuaucaa

SEQ ID NO: 674 - RNA, 69 nt, Artificial Sequence
  Synthetic nucleic acid sequence
guuuuagagcuaugcuguuuuggaaacaaaacagcauagcaaguuaaaauaaggcuaguccguuaucaa

SEQ ID NO: 675 - RNA, 70 nt, Artificial Sequence
  Synthetic nucleic acid sequence
guuuuagagcuaguuuuagagcuagaaauagcaaguuaaaauuagcaaguuaaaauaaggcuaguccguu

SEQ ID NO: 676 - RNA, 70 nt, Artificial Sequence
  Synthetic nucleic acid sequence
guuuuagagcuauagcaaguuaaaaugaaaguuuuagagcuauagcaaguuaaaauaaggcuaguccguu

SEQ ID NO: 677 - RNA, 74 nt, Artificial Sequence
  Synthetic nucleic acid sequence
guuuuagagcuagaaauagcaaguuaaaauguuuuagagcuagaaauagcaaguuaaaauaaggcuaguccguu

SEQ ID NO: 678 - RNA, 119 nt, Artificial Sequence
  Synthetic nucleic acid sequence
guuuuagagcuaugcuguuuuggaaacaaaacagcauagcaaguuaaaauguuuuagagcuaugcuguuuuggaaacaaaacagcauagcaaguuaaaauaaggcuaguccguuaucaa

SEQ ID NO: 679 - RNA, 12 nt, Artificial Sequence
  Synthetic nucleic acid sequence
guuuuagagcua

SEQ ID NO: 680 - RNA, 218 nt, Artificial Sequence
  Synthetic nucleic acid sequence
  misc_feature (1)..(80): n at each of these positions can be present or absent such that this region can contain anywhere from 12 to 80 nucleotides. n is a, c, g, or u
  misc_feature (93)..(192): n at each of these positions can be present or absent such that this region can contain anywhere from 3 to 100 nucleotides. n is a, c, g, or u
nnnnnnnnnnnnnnnnnnnnnnnnnnnnnnnnnnnnnnnnnnnnnnnnnnnnnnnnnnnnnnnnnnnnnnnnnnnnnnnnguuuuagagcuannnnnnnnnnnnnnnnnnnnnnnnnnnnnnnnnnnnnnnnnnnnnnnnnnnnnnnnnnnnnnnnnnnnnnnnnnnnnnnnnnnnnnnnnnnnnnnnnnnnuagcaaguuaaaauaaggcuaguccg

SEQ ID NO: 681 - RNA, 219 nt, Artificial Sequence
  Synthetic nucleic acid sequence
  misc_feature (1)..(80): n at each of these positions can be present or absent such that this region can contain anywhere from 12 to 80 nucleotides. n is a, c, g, or u
  misc_feature (93)..(192): n at each of these positions can be present or absent such that this region can contain anywhere from 3 to 100 nucleotides. n is a, c, g, or u
nnnnnnnnnnnnnnnnnnnnnnnnnnnnnnnnnnnnnnnnnnnnnnnnnnnnnnnnnnnnnnnnnnnnnnnnnnnnnnnnguuuuagagcuannnnnnnnnnnnnnnnnnnnnnnnnnnnnnnnnnnnnnnnnnnnnnnnnnnnnnnnnnnnnnnnnnnnnnnnnnnnnnnnnnnnnnnnnnnnnnnnnnnnuagcaaguuaaaauaaggcuuuguccg

SEQ ID NO: 682 - RNA, 163 nt, Artificial Sequence
  Synthetic nucleic acid sequence
  misc_feature (1)..(80): n at each of these positions can be present or absent such that this region can contain anywhere from 12 to 80 nucleotides. n is a, c, g, or u
nnnnnnnnnnnnnnnnnnnnnnnnnnnnnnnnnnnnnnnnnnnnnnnnnnnnnnnnnnnnnnnnnnnnnnnnnnnnnnnnguuuuagagcuagaaauagcaaguuaaaauaaggcuaguccguuaucaacuugaaaaaguggcaccgagucggugcuuuuuuu

SEQ ID NO: 683 - RNA, 39 nt, Artificial Sequence
  Synthetic nucleic acid sequence
aucaacuugaaaaaguggcaccgagucggugcuuuuuuu

SEQ ID NO: 684 - RNA, 33 nt, Artificial Sequence
  Synthetic nucleic acid sequence
aaaaucaaaggaucuucuugagauccuuuuuuu

SEQ ID NO: 685 - RNA, 34 nt, Artificial Sequence
  Synthetic nucleic acid sequence
cgccgaaaaccccgcuucggcgggguuuugccgc

SEQ ID NO: 686 - RNA, 34 nt, Artificial Sequence
  Synthetic nucleic acid sequence
cgcaaaaaaccccgcuucggcgggguuuuuucgc

SEQ ID NO: 687 - RNA, 39 nt, Artificial Sequence
  Synthetic nucleic acid sequence
aaaaaaaaaccccgccccugacagggcgggguuuuuuuu

SEQ ID NO: 688 - RNA, 40 nt, Artificial Sequence
  Synthetic nucleic acid sequence
cgcaaaaaaccccgccccugacagggcgggguuuuuucgc

SEQ ID NO: 689 - RNA, 41 nt, Artificial Sequence
  Synthetic nucleic acid sequence
ucacacuggcucaccuucgggugggccuuucugcguuuaua

SEQ ID NO: 690 - RNA, 46 nt, Artificial Sequence
  Synthetic nucleic acid sequence
agagaauauaaaaagccagauuauuaauccggcuuuuuuauuauuu

SEQ ID NO: 691 - RNA, 80 nt, Artificial Sequence
  Synthetic nucleic acid sequence
ccaggcaucaaauaaaacgaaaggcucagucgaaagacugggccuuucguuuuaucuguuguuugucggugaacgcucuc

SEQ ID NO: 692 - RNA, 123 nt, Artificial Sequence
  Synthetic nucleic acid sequence
aucaaaauuuacggcuuugaaaaaguaauuucgugaccuucgguauaagguuacuacuagauucaggugcucaucagaugcaccacauucucuauaaaaaaaaaugguaucuuucuuauuuga

SEQ ID NO: 693 - RNA, 129 nt, Artificial Sequence
  Synthetic nucleic acid sequence
ccaggcaucaaauaaaacgaaaggcucagucgaaagacugggccuuucguuuuaucuguuguuugucggugaacgcucucuacuagagucacacuggcucaccuucgggugggccuuucugcguuuaua

SEQ ID NO: 694 - RNA, 129 nt, Artificial Sequence
  Synthetic nucleic acid sequence
gcaugugcucuguauguauauaaaacucuuguuuucuucuuuucucuaaauauucuuuccuuauacauuaggaccuuugcagcauaaauuacuauacuucuauuacuagagcccgccgccaccauggag

SEQ ID NO: 695 - RNA, 139 nt, Artificial Sequence
  Synthetic nucleic acid sequence
auuccgauaacuuguuuauugcagcuuauaaugguuacaaauaaagcaauagcaucacaaauuucacaaauaaagcauuuuuuucacugcauucuaguugugguuuguccaaacucaucaauguaucuuaucaugucug

SEQ ID NO: 696 - RNA, 225 nt, Artificial Sequence
  Synthetic nucleic acid sequence
uaauaagcgaauuucuuaugauuuaugauuuuuauuauuaaauaaguuauaaaaaaaauaaguguauacaaauuuuaaagugacucuuagguuuuaaaacgaaaauucuuauucuugaguaacucuuuccuguaggucagguugcuuucucagguauagcaugaggucgcucuuauugaccacaccucuaccggcaugccgagcaaaugccugcaaaucgcuccc

SEQ ID NO: 697 - RNA, 53 nt, Artificial Sequence
  Synthetic nucleic acid sequence
aacuuucaguuuagcggucuguuuuagagcuagaaauagcaaguuaaaauaag

SEQ ID NO: 698 - DNA, 31 bp, Artificial Sequence
  Synthetic nucleic acid sequence
aaggtacccagaccgctaaactgaaagttac

SEQ ID NO: 699 - DNA, 31 bp, Artificial Sequence
  Synthetic nucleic acid sequence
gtaactttcagtttagcggtctgggtacctt

SEQ ID NO: 700 - DNA, 40 bp, Artificial Sequence
  Synthetic nucleic acid sequence
agtttttaaaagagcttggcggttgttttagtcccttttt

SEQ ID NO: 701 - DNA, 42 bp, Artificial Sequence
  Synthetic nucleic acid sequence
caaagtttcattagttgaatttaactgttttagtcccttttt

SEQ ID NO: 702 - DNA, 42 bp, Artificial Sequence
  Synthetic nucleic acid sequence
aagaatgaggatgatgatattttacagttttagtcccttttt

SEQ ID NO: 703 - DNA, 42 bp, Artificial Sequence
  Synthetic nucleic acid sequence
gtgtgctaaaaaaaatggacttaaatgttttagtcccttttt

SEQ ID NO: 704 - DNA, 74 bp, Artificial Sequence
  Synthetic nucleic acid sequence
aagaaatttaaaaagggactaaaataaagagtttgcgggactctgcggggttacaatcccctaaaaccgctttt

SEQ ID NO: 705 - DNA, 54 bp, Artificial Sequence
  Synthetic nucleic acid sequence
ataactcgaccaatatttgacaaagtttcagttgctgaattatttggtaaacct

SEQ ID NO: 706 - DNA, 58 bp, Artificial Sequence
  Synthetic nucleic acid sequence
ggcaggttttgtatggtcatataggagtgtttcagttgctgaattatttggtaaacct

SEQ ID NO: 707 - DNA, 69 bp, Artificial Sequence
  Synthetic nucleic acid sequence
agctatagggttacctatcttttgagtgttggcaaataagtttcagttgctgaattatttggtaaacct

SEQ ID NO: 708 - DNA, 54 bp, Artificial Sequence
  Synthetic nucleic acid sequence
atgcttttaaactactgatatatacgtttcagttgctgaattatttggtaaact

SEQ ID NO: 709 - DNA, 80 bp, Artificial Sequence
  Synthetic nucleic acid sequence
gtaccaaataattaatgctctgtaatcatttaaaagtattttgaacggacctctgtttgacacgtctgaataactaaaaa

SEQ ID NO: 710 - DNA, 52 bp, Artificial Sequence
  Synthetic nucleic acid sequence
tatccattcccagccggaaattaagttgtagctccctttctcatttcgcagt

SEQ ID NO: 711 - DNA, 53 bp, Artificial Sequence
  Synthetic nucleic acid sequence
gcctttttacaagctcgctttctttgttgtagctccctttctcatttcgcagt

SEQ ID NO: 712 - DNA, 53 bp, Artificial Sequence
  Synthetic nucleic acid sequence
taaaggtttctgttgcgacccgaatgttgtagctccctttctcatttcgcagt

SEQ ID NO: 713 - DNA, 55 bp, Artificial Sequence
  Synthetic nucleic acid sequence
taactttgaccgtgtgcaatccagttagttgtagctccctttctcatttcgcagt

SEQ ID NO: 714 - DNA, 52 bp, Artificial Sequence
  Synthetic nucleic acid sequence
aacccactaaattttgcaaatgcggttgtagctccctttctcatttcgcagt

SEQ ID NO: 715 - DNA, 53 bp, Artificial Sequence
  Synthetic nucleic acid sequence
tttttttgtactgttgtttgaacgagttgtagctccctttctcatttcgcagt

SEQ ID NO: 716 - DNA, 55 bp, Artificial Sequence
  Synthetic nucleic acid sequence
ttcgtttcagatagcaaacgcagtagtgttgtagctccctttctcatttcgcagt

SEQ ID NO: 717 - DNA, 84 bp, Artificial Sequence
  Synthetic nucleic acid sequence
atatgacggtgggcaactggtacaggttgtagctccctttctcatttcgcagtgctacaatgccggatatgacggtgggcaact

SEQ ID NO: 718 - DNA, 52 bp, Artificial Sequence
  Synthetic nucleic acid sequence
cttttgtattgattcaaggtgcttgttgtagctccctttctcatttcgcagt

SEQ ID NO: 719 - DNA, 55 bp, Artificial Sequence
  Synthetic nucleic acid sequence
attcgtcgatgatggaaactcgagcatgttgtagctccctttctcatttcgcagt

SEQ ID NO: 720 - DNA, 55 bp, Artificial Sequence
  Synthetic nucleic acid sequence
tagccagtgctaaaaccgcacccgcttgttgtagctccctttctcatttcgcagt

SEQ ID NO: 721 - DNA, 54 bp, Artificial Sequence
  Synthetic nucleic acid sequence
atagaaatacatacgccgagtaattagttgtagctccctttctcatttcgcagt

SEQ ID NO: 722 - DNA, 54 bp, Artificial Sequence
  Synthetic nucleic acid sequence
tttttgtaattgttctgccttttttagttgtagctccctttctcatttcgcagt

SEQ ID NO: 723 - DNA, 53 bp, Artificial Sequence
  Synthetic nucleic acid sequence
acggcggaaaccattgccacaaaacgttgtagctccctttctcatttcgcagt

SEQ ID NO: 724 - DNA, 54 bp, Artificial Sequence
  Synthetic nucleic acid sequence
aataataacccaatacacgatgttaagttgtagctccctttctcatttcgcagt

SEQ ID NO: 725 - DNA, 171 bp, Artificial Sequence
  Synthetic nucleic acid sequence
ttgtcttatttatatacaaatagattattgacttatcatctcacaacggctagaatcccaaacatattgtcgcactgcgaaatgagaaccgttgctacaataaggccgtctgaaaagatgtgccgcaacgctctgccccttaaagcttctgctttaaggggcatcgtttat

SEQ ID NO: 726 - DNA, 35 bp, Artificial Sequence
  Synthetic nucleic acid sequence
ggtaactttgcctaggatagttttagagctatgtt

SEQ ID NO: 727 - DNA, 22 bp, Artificial Sequence
  Synthetic nucleic acid sequence
cattatgttttagagctatgtt

SEQ ID NO: 728 - DNA, 24 bp, Artificial Sequence
  Synthetic nucleic acid sequence
gagttttagagctatgttattttg

SEQ ID NO: 729 - DNA, 27 bp, Artificial Sequence
  Synthetic nucleic acid sequence
ttatagttttagagctatgttattttg

SEQ ID NO: 730 - DNA, 26 bp, Artificial Sequence
  Synthetic nucleic acid sequence
taaatgttttagagctatgttatttt

SEQ ID NO: 731 - DNA, 23 bp, Artificial Sequence
  Synthetic nucleic acid sequence
tacaagttttagagctatgttat

SEQ ID NO: 732 - DNA, 30 bp, Artificial Sequence
  Synthetic nucleic acid sequence
ttcatgttgttttagagctatgttattttg

SEQ ID NO: 733 - DNA, 28 bp, Artificial Sequence
  Synthetic nucleic acid sequence
gttttagagctatgctatttcgaatact

SEQ ID NO: 734 - DNA, 92 bp, Artificial Sequence
  Synthetic nucleic acid sequence
attgttagtattcaaaataacatagcaagttaaaataaggctttgtccgttatcaacttttaattaagtagcgctgtttcggcgcttttttt

SEQ ID NO: 735 - DNA, 43 bp, Artificial Sequence
  Synthetic nucleic acid sequence
gccattaattaatatggtgagttttagagctgtgttgtttcga

SEQ ID NO: 736 - DNA, 43 bp, Artificial Sequence
  Synthetic nucleic acid sequence
gctagcgcagttagtgctctgttttagagctgtgttgtttcga

SEQ ID NO: 737 - DNA, 43 bp, Artificial Sequence
  Synthetic nucleic acid sequence
tgttgtgtcatcatagttaggttttagagctgtgttgtttcga

SEQ ID NO: 738 - DNA, 43 bp, Artificial Sequence
  Synthetic nucleic acid sequence
caattagacaatagacaaacgttttagagctgtgttgtttcga

SEQ ID NO: 739 - DNA, 44 bp, Artificial Sequence
  Synthetic nucleic acid sequence
ttcggacatgacttgccacagttttagagctgtgttgttatcga

SEQ ID NO: 740 - DNA, 107 bp, Artificial Sequence
  Synthetic nucleic acid sequence
gttggaatcattcgaaacaacacagcaagttaaaataaggcagtgatttttaatccagtccgtacacaacttgaaaaagtgcgcaccgattcggtgcttttttattt

SEQ ID NO: 741 - RNA, 20 nt, Artificial Sequence
  Synthetic nucleic acid sequence
ugguccgcugccguucgcuu

SEQ ID NO: 742 - RNA, 20 nt, Artificial Sequence
  Synthetic nucleic acid sequence
gcagaaaaaaaccauggguu

SEQ ID NO: 743 - RNA, 20 nt, Artificial Sequence
  Synthetic nucleic acid sequence
aaaaaaccgguucagcugcc

SEQ ID NO: 744 - RNA, 20 nt, Artificial Sequence
  Synthetic nucleic acid sequence
aacuuucaguuuagcggucu

SEQ ID NO: 745 - RNA, 20 nt, Artificial Sequence
  Synthetic nucleic acid sequence
aggacaguuucagguagucc

SEQ ID NO: 746 - RNA, 20 nt, Artificial Sequence
  Synthetic nucleic acid sequence
aaccgguuuuuuagccaugu

SEQ ID NO: 747 - RNA, 20 nt, Artificial Sequence
  Synthetic nucleic acid sequence
uugacagcuagcucaguccu

SEQ ID NO: 748 - RNA, 20 nt, Artificial Sequence
  Synthetic nucleic acid sequence
cccggaagagagucaauuca

SEQ ID NO: 749 - RNA, 20 nt, Artificial Sequence
  Synthetic nucleic acid sequence
cccugaauugacucucuucc

SEQ ID NO: 750 - RNA, 20 nt, Artificial Sequence
  Synthetic nucleic acid sequence
gaauucauuaaagaggagaa

SEQ ID NO: 751 - RNA, 20 nt, Artificial Sequence
  Synthetic nucleic acid sequence
gaauggugcaaaaccuuucg

SEQ ID NO: 752 - DNA, 141 bp, Artificial Sequence
  Synthetic nucleic acid sequence
cgacaccatcgaatggtgcaaaacctttcgcggtatggcatgatagcgcccggaagagagtcaattcagggtggtgaatttgacagctagctcagtcctaggtataatagatctgaattcattaaagaggagaaaggtacc

SEQ ID NO: 753 - RNA, 20 nt, Artificial Sequence
  Synthetic nucleic acid sequence
aacuuucaguuuagcggucu

SEQ ID NO: 754 - RNA, 20 nt, Artificial Sequence
  Synthetic nucleic acid sequence
uggaaccguacuggaacugc

SEQ ID NO: 755 - RNA, 20 nt, Artificial Sequence
  Synthetic nucleic acid sequence
gguaguccgggaugucagcc

SEQ ID NO: 756 - RNA, 20 nt, Artificial Sequence
  Synthetic nucleic acid sequence
aggacaguuucagguagucc

SEQ ID NO: 757 - RNA, 20 nt, Artificial Sequence
  Synthetic nucleic acid sequence
gucuugcagggaggaguccu

SEQ ID NO: 758 - RNA, 20 nt, Artificial Sequence
  Synthetic nucleic acid sequence
gcauaaccggaccgucggac

SEQ ID NO: 759 - RNA, 20 nt, Artificial Sequence
  Synthetic nucleic acid sequence
cuuucagagcaccgucuucc

SEQ ID NO: 760 - RNA, 20 nt, Artificial Sequence
  Synthetic nucleic acid sequence
gaugguguagucuucguugu

SEQ ID NO: 761 - RNA, 20 nt, Artificial Sequence
  Synthetic nucleic acid sequence
caucuaauucaacaagaauu

SEQ ID NO: 762 - RNA, 20 nt, Artificial Sequence
  Synthetic nucleic acid sequence
caucuaauucaacaagaauu

SEQ ID NO: 763 - RNA, 20 nt, Artificial Sequence
  Synthetic nucleic acid sequence
aguagugcaaauaaauuuaa

SEQ ID NO: 764 - RNA, 20 nt, Artificial Sequence
  Synthetic nucleic acid sequence
acaaguguuggccacggaac

SEQ ID NO: 765 - RNA, 20 nt, Artificial Sequence
  Synthetic nucleic acid sequence
uuucaugugauccggauaac

SEQ ID NO: 766 - RNA, 20 nt, Artificial Sequence
  Synthetic nucleic acid sequence
cguuccuguacauaaccuuc

SEQ ID NO: 767 - RNA, 20 nt, Artificial Sequence
  Synthetic nucleic acid sequence
uaacucgauacgauuaacaa

SEQ ID NO: 768 - RNA, 20 nt, Artificial Sequence
  Synthetic nucleic acid sequence
auaauggucugcuaguugaa

SEQ ID NO: 769 - RNA, 20 nt, Artificial Sequence
  Synthetic nucleic acid sequence
auguggucacgcuuuucguu

SEQ ID NO: 770 - RNA, 20 nt, Artificial Sequence
  Synthetic nucleic acid sequence
aacuuucaguuuagcggucu

SEQ ID NO: 771 - RNA, 20 nt, Artificial Sequence
  Synthetic nucleic acid sequence
uggaaccguacuggaacugc

SEQ ID NO: 772 - RNA, 20 nt, Artificial Sequence
  Synthetic nucleic acid sequence
gaugguguagucuucguugu

SEQ ID NO: 773 - RNA, 20 nt, Artificial Sequence
  Synthetic nucleic acid sequence
uuccggguacauacguucgg

SEQ ID NO: 774 - RNA, 20 nt, Artificial Sequence
  Synthetic nucleic acid sequence
gguaguccgggaugucagcc

SEQ ID NO: 775 - RNA, 20 nt, Artificial Sequence
  Synthetic nucleic acid sequence
aggacaguuucagguagucc

SEQ ID NO: 776 - RNA, 20 nt, Artificial Sequence
  Synthetic nucleic acid sequence
uugacagcuagcucaguccu

SEQ ID NO: 777 - RNA, 20 nt, Artificial Sequence
  Synthetic nucleic acid sequence
aaccgguuuuuuagccaugu

SEQ ID NO: 778 - RNA, 20 nt, Artificial Sequence
  Synthetic nucleic acid sequence
aaaaaaccgguucagcugcc

SEQ ID NO: 779 - RNA, 20 nt, Artificial Sequence
  Synthetic nucleic acid sequence
uugggaagggcgaucggugc

SEQ ID NO: 780 - RNA, 20 nt, Artificial Sequence
  Synthetic nucleic acid sequence
gcuggccugguucaccacgc

SEQ ID NO: 781 - RNA, 20 nt, Artificial Sequence
  Synthetic nucleic acid sequence
guagccaaaucgggaaaaac

SEQ ID NO: 782 - RNA, 20 nt, Artificial Sequence
  Synthetic nucleic acid sequence
cgguaagccuucgcacauau

SEQ ID NO: 783 - RNA, 20 nt, Artificial Sequence
  Synthetic nucleic acid sequence
acaagaaccauucgagaguc

SEQ ID NO: 784 - RNA, 20 nt, Artificial Sequence
  Synthetic nucleic acid sequence
gucaagcagcaguauaugcu

SEQ ID NO: 785 - RNA, 20 nt, Artificial Sequence
  Synthetic nucleic acid sequence
ugugaguuagcucacucauu

SEQ ID NO: 786 - RNA, 20 nt, Artificial Sequence
  Synthetic nucleic acid sequence
auguuguguggaauugugag

SEQ ID NO: 787 - RNA, 20 nt, Artificial Sequence
  Synthetic nucleic acid sequence
cuuccggcucguauguugug

SEQ ID NO: 788 - RNA, 20 nt, Artificial Sequence
  Synthetic nucleic acid sequence
gggcgaggagcuguucaccg

SEQ ID NO: 789 - RNA, 20 nt, Artificial Sequence
  Synthetic nucleic acid sequence
ggccacaaguucagcguguc

SEQ ID NO: 790 - RNA, 20 nt, Artificial Sequence
  Synthetic nucleic acid sequence
gcccuugcucaccaugguug

SEQ ID NO: 791 - RNA, 20 nt, Artificial Sequence
  Synthetic nucleic acid sequence
gaccaggaugggcaccaccc

SEQ ID NO: 792 - RNA, 20 nt, Artificial Sequence
  Synthetic nucleic acid sequence
gguggugcagaugaacuuca

SEQ ID NO: 793 - RNA, 20 nt, Artificial Sequence
  Synthetic nucleic acid sequence
guggucacgagggugggcca

SEQ ID NO: 794 - RNA, 20 nt, Artificial Sequence
  Synthetic nucleic acid sequence
gcacggggccgucgccgaug

SEQ ID NO: 795 - protein, 240 aa, Acetobacter aceti
MANIAENLVFGIDLGIGSCGWAVLNQKAKDENIVALGSWCFDVPETDKERIPTNQIRRANRLLRRVIRRRRNRMAEIRRLFASKGMLDTADPDALAKISADPWEMRAKGLDYQLTPQEFAVALGHIAKRRGFKSAAKRVSTNAPSEDSKMLAALEKTKEQSAQYRTIGEMFARDPAYADRRRNRDGCFDRTMSREDLFKETQILFESQRRLGNFSATSETEQAFIDIAFRQKPMQDSERL

SEQ ID NO: 796 - protein, 400 aa, Acetobacter aceti
SFERFRLLCRLVNLRVTDGLEDRPLTPEELRLACEDAGKTRKLSVKKVRSLIGLRDDQRFTTIPPDQEQHDIAARTGDALTGTATFRAILGESFWRQLLPHPEQLDRAAWIISFHELTDTIISKLATIGLPSEVMELIRKALEDGKFSKFKGAASLSDKAARKLIPFLQEGLTYDKACQKAGYNHAASKFTHYDSIDTKAKFNSLMDDVRDSITNPVARKAISEGMKQVWAMRNQWGLPGAICIELARDVGNSAEKRREIESGIKKNTAQRERERQEAKEHLNQSDISSETLLRYRLWKEQGGRCCYTDQPITPSQLIASDNSVQVDHILPWSRFGDDSYLNKALCTAKANQEKKNRTPWEWIHNQKGVEAWNHFTAAVESRKETRGLKKRNFLLKSSKE

SEQ ID NO: 797 - protein, 376 aa, Acetobacter aceti
YAARVMAEAVRLLYPSGNRAEKGGVKRVFTRPGALTAALRHAWGVESLKKINGKRLNDDRHHALDAAVVAAVSEKEIQKLTKSFQICEQKGLARPMRDVPMPWEGFRHQLETAYADIRVARPERRRARGKGHDATIRQLREEKDGPVVYERRAISDLKLTDLERIKDPERNSAIISSLRTWIEKGKPADYPPQSPKGDEIRKIRVMSRNKPAVSVRGGTADRGEMTRVDVFTKMGKKGKPEWFLVPIYRHQVIDRIQWPQPPNQAAANGKSEKNWPTMGLEHEFRFSLYPRSYVQIVKRDGEIIEGYFAGLDRTVAAFSLLSSSDPTSIQRGIGAKTLESIRKYNVNRFGDISMVEQETRTWHGDVCISPDQPDSA

SEQ ID NO: 798 - protein, 1054 aa, Actinobacillus suis
MKLTPLNYILGLDLGIASVGWAVVEIDEQENPLGLIDVGVRTFDRAEVPKTGESLALARRLARSARRLVKRRADRIKKAKRLLKAENILLSADEHLPNDVWQLRVKGLDQKLERQEWAAVLLHLLKHRGYLSQRKNESKSENKELGALLSGVETNHQILQSAEYRTPAEIAVKKFHVEDGHIRNQRGAYTHTFSRLDLLAEMELLFQRQTDLGNPHTSAKLLENLTALLMWQKPALAGEAILKMLGKCTFEPTEYKAAKNSYSAERFVWLTKLNNLRILEQGAERALTDNERFALLDQPYEKAKFTYAQARTMLALPDEAIFKGVRYQGEDKKAVETKTILMEMKAYHQIRKALENADLKAEWNELKNNSELLDDIGTAFSLHKTDEDICRYLDGKLSESILNALLENLNFDKFIQLSLKALQQILPLMLQGQRYDEAVSAIYGDHYGKKSAEINRLLPTIPADEIRNPVVLRTLTQARKVINAVVRLYGSPARIHIETGREVGKSYQDRKKLEKQQEDNRKQRESAVKKFKEYFPNFVGEPKGKDILKMRLYELQQAKCLYSGKSLELHRLLEKGYVEVDHALPFSRTWDDSFNNKVLVLANENQNKGNLTPYEWLDGKNNSEHWQNFVARVQTSGFSHTKKQRILSHKLDEKGFIERNLNDTRYVARFLCNFIADNMLLTGKGKRKVFASNGQITALLRGRWGLQKVRDDNDRHHALDAVVVACSTVVMQQKITRFVRYEEGNVFSGERIDRETGEIIPLHFPSPWAFFRENVEIRIFSENPKLELENRLPDYPQYNHEFVQPLFVSRMPTRKMTGQGHMETVKSAKRLDEGLSVLKVPLTQLKLSDLERMVNREREVTLYESLKARLEQFGNDPAKAFAEPFHKKGGAVVKAVRVEQTQKSGVLVRDGNGVADNASMVRVDVFTKGGKYFLVPIYTWQVAKGILPNKAVTANVDEIDWLEMDESYQFIFTMYPNDLVKVKLKKEEFFGYYGGLDRATGAIVIKEHDLEKSKGKQGIYRIGVKLALSFEKYQVDELGKNIRPCRPTKRQHVR

SEQ ID NO: 799 - protein, 239 aa, Actinobacillus ureae
MEIRIFSENPKLGLENRLPGYPQYNHEFVQPLFVSRMPTRKMTGKGHMETVKSAKRLDEGLSVLKVPLTQLKLSDLERMVNREREDALYQSLKAHLEQFGNDPAKAFAEPFHKKGGTVVKAVRVEQTQKSGVLVRDGNGVADNTSMVRVDVFTKAGKYFLVPIYKWQVAKRILPNKAVTAGVDEIDWLEMDSSYQFIFTMYANDLVKVKLKKRSILGLLRWFRSCNWGYCYQRTRFREI

SEQ ID NO: 800 - protein, 400 aa, Actinobacillus ureae
MKLTPLNYILGLDLGIASVGWAVVEIDEQENPLGLIDVGVRTFDRAEVAKTGESLALARRLARSSRRLVKRRADRIKKAKRLLKAENLLLSADEILPNDVWQLRVKGLDQKLERQEWAAVLLHILKHRGYLSQRKNESKSENKELGALLSGVATNHQLLQTAEYRTPAEITVKKFQAEENGHGHIRNQRGDYSHTFDRKDLLAEMKLLFQRQAELGNPHTSEKLLENLTTLLLWQKPALAGEAILKMLGKCTFEPAEYKAAKNSYSAERFVWLTKLNNLRILENGIERALTDNERFTLLDQPYEKAKLTYAQARTMLALSDEAIFKGVRYQGEDKKAAEKVALIEMKGYQHIRKALEGAGLKAEWNELKNNSELLDDIGTAFSLYFSISNLPTEIAYFTP

SEQ ID NO: 801 - protein, 1113 aa, Actinomyces georgiae
MSASSQNVERIRYKVGIDVGLRSIGFCAVQVDADDRPVKLLNTVVHVHDAGVSPADAKKADTRKLVSGVARRTRRLYRTRKRRLVDLDRQLDGLGWPLVDPARFADPREPWFAREKLVSGRVDDADERKELLSVALRHIAHHRGWRNPYSTVESLQADAPPSEFLQGLNQRVSEKLGTELDPGLTQGQLVAKLLHRFPNAKIRGPEGILRGKLHQSDNAGELRLICRTQGLDCHITEELVRLVFQAKSPKANKEMRKRIGRDQLPGQGAHIRAEKAHPVFQRFRIVAVLANLRIREAHVDRRLTAEEMRTLTDFLLGLAGSEQPTWEELADNLNIERHQLRGTAKASVDGAPALRFPPIDATTDRIYASKLKWLAEWWRQADEERRGYMVDALSNSGGSEDEPYLDDEIAEMLEQASEEDQAKLDSLHLPGGRASYCLDTLRRLTDAMLGGGLDLFEARKAVFHVDDDWAPPTDPIGAPVGNPPVDRVLKHVARWLEAATGRWGAPQTINIEHVREGLGSEKAARELTRMNDRRRRNNQKLVEEMGEKLGMSGRIRRSDRMRYEAIRRQNCECLYCGQPITYQTMEMDHIVPRAGAASTNSRSNLAAVCRRCNHQKGKLPFAVWAESQDSPAEVRLQDAVQRVRHWLRDAGMGQKELQALRVQVIARLKSKRPDEEFDGRSMESIAWMANELRARVEAQYRGSGTTVRVYRGALTAEARKASGFEGRVNLIGGRGKDRFDRRHHAMDALVIALMNQSVAQTLALRLNMRDSQWLTQSEQTWRQFHGAPGEAARKWEAWDRDMRDASDLFNLALDGGRIPITENVRLRVGNGRVHEDGVIRFKPEYEVKGKTIKGGEARLLGDSLPSEQIDRAETPALWTALTRLPEYDRKSGLPENPDRVIRVNGAVVQATDRIRFFGTPASVAVRGGYAKLGESIHHARIYRINGKTPKYAMIRVYTIDLMRLNHEDIFTAVLKPSTISMRCAEKKLKYAIAEGNAEQIGWLVEGDQLELDAAAYAKGVGADLMREYPMATCWRVAGFPDEAKLRLRPVLLAAEGMGEDAPKFMREVLENQGWRPAVNALLSPGSVRVVRRNVLGEPRFKSSGHLPTTVDLV

SEQ ID NO: 802 - protein, 1101 aa, Actinomyces naeslundii
MWYASLMSAHHLRVGIDVGTHSVGLATLRVDDHGTPIELLSALSHIHDSGVGKEGKKDHDTRKKLSGIARRARRLLHHRRTQLQQLDEVLRDLGFPIPTPGEFLDLNEQTDPYRVWRVRARLVEEKLPEELRGPAISMAVRHIARHRGWRNPYSKVESLLSPAEESPFMKALRERILATTGEVLDDGITPGQAMAQVALTHNISMRGPEGILGKLHQSDNANEIRKICARQGVSPDVCKQLLRAVFKADSPRGSAVSRVAPDPLPGQGSFRRAPKCDPEFQRFRIISIVANLRISETKGENRPLTADERRHVVTFLTEDSQADLTWVDVAEKLGVHRRDLRGTAVHTDDGERSAARPPIDATDRIMRQTKISSLKTWWEEADSEQRGAMIRYLYEDPTDSECAEIIAELPEEDQAKLDSLHLPAGRAAYSRESLTALSDHMLATTDDLHEARKRLFGVDDSWAPPAEAINAPVGNPSVDRTLKIVGRYLSAVESMWGTPEVIHVEHVRDGFTSERMADERDKANRRRYNDNQEAMKKIQRDYGKEGYISRGDIVRLDALELQGCACLYCGTTIGYHTCQLDHIVPQAGPGSNNRRGNLVAVCERCNRSKSNTPFAVWAQKCGIPHVGVKEAIGRVRGWRKQTPNTSSEDLTRLKKEVIARLRRTQEDPEIDERSMESVAWMANELHHRIAAAYPETTVMVYRGSITAAARKAAGIDSRINLIGEKGRKDRIDRRHHAVDASVVALMEASVAKTLAERSSLRGEQRLTGKEQTWKQYTGSTVGAREHFEMWRGHMLHLTELFNERLAEDKVYVTQNIRLRLSDGNAHTVNPSKLVSHRLGDGLTVQQIDRACTPALWCALTREKDFDEKNGLPAREDRAIRVHGHEIKSSDYIQVFSKRKKTDSDRDETPFGAIAVRGGFVEIGPSIHHARIYRVEGKKPVYAMLRVFTHDLLSQRHGDLFSAVIPPQSISMRCAEPKLRKAITTGNATYLGWVVVGDELEINVDSFTKYAIGRFLEDFPNTTRWRICGYDTNSKLTLKPIVLAAEGLENPSSAVNEIVELKGWRVAINVLTKVHPTVVRRDALGRPRYSSRSNLPTSWTIE

SEQ ID NO: 803 - protein, 1181 aa, Unknown
  Actinomyces sp. oral taxon 180 str. F0310
MLHCIAVIRVPPSEEPGFFETHADSCALCHHGCMTYAANDKAIRYRVGIDVGLRSIGFCAVEVDDEDHPIRILNSVVHVHDAGTGGPGETESLRKRSGVAARARRRGRAEKQRLKKLDVLLEELGWGVSSNELLDSHAPWHIRKRLVSEYIEDETERRQCLSVAMAHIARHRGWRNSFSKVDTLLLEQAPSDRMQGLKERVEDRTGLQFSEEVTQGELVATLLEHDGDVTIRGFVRKGGKATKVHGVLEGKYMQSDLVAELRQICRTQRVSETTFEKLVLSIFHSKEPAPSAARQRERVGLDELQLALDPAAKQPRAERAHPAFQKFKVVATLANMRIREQSAGERSLTSEELNRVARYLLNHTESESPTWDDVARKLEVPRHRLRGSSRASLETGGGLTYPPVDDTTVRVMSAEVDWLADWWDCANDESRGHMIDAISNGCGSEPDDVEDEEVNELISSATAEDMLKLELLAKKLPSGRVAYSLKTLREVTAAILETGDDLSQAITRLYGVDPGWVPTPAPIEAPVGNPSVDRVLKQVARWLKFASKRWGVPQTVNIEHTREGLKSASLLEEERERWERFEARREIRQKEMYKRLGISGPFRRSDQVRYEILDLQDCACLYCGNEINFQTFEVDHIIPRVDASSDSRRTNLAAVCHSCNSAKGGLAFGQWVKRGDCPSGVSLENAIKRVRSWSKDRLGLTEKAMGKRKSEVISRLKTEMPYEEFDGRSMESVAWMAIELKKRIEGYFNSDRPEGCAAVQVNAYSGRLTACARRAAHVDKRVRLIRLKGDDGHHKNRFDRRNHAMDALVIALMTPAIARTIAVREDRREAQQLTRAFESWKNFLGSEERMQDRWESWIGDVEYACDRLNELIDADKIPVTENLRLRNSGKLHADQPESLKKARRGSKRPRPQRYVLGDALPADVINRVTDPGLWTALVRAPGFDSQLGLPADLNRGLKLRGKRISADFPIDYFPTDSPALAVQGGYVGLEFHHARLYRIIGPKEKVKYALLRVCAIDLCGIDCDDLFEVELKPSSISMRTADAKLKEAMGNGSAKQIGWLVLGDEIQIDPTKFPKQSIGKFLKECGPVSSWRVSALDTPSKITLKPRLLSNEPLLKTSRVGGHESDLVVAECVEKIMKKTGWVVEINALCQSGLIRVIRRNALGEVRTSPKSGLPISLNLR

SEQ ID NO: 804 - protein, 1120 aa, Unknown
  Actinomyces sp. oral taxon 848 str. F0332
MNAMKQYNAGIDVGINSVGFAAIEVDSKGLPLNILNNMVVLHDSGVDPGTAKTGATRLANSGTARRTRKLIARRRKRLQKLDRYIEVQGWPLVDFSSLPDPYTPWKIRAKLTQDRLEGEEQGRGLSIALRHMARHRGWRNPYEGVESLHSPKEASKQFKDLKDRVTKVSGVIFDEDATPAEVVCDIGLSPKQRLRSAPSAKYKEGATLADEPVGGKSKEGLLGGKLMQSDNANELRKIGIVQGLSNEKVNEIIDQVFASESPKGQAGKRAKKDELPGQEQYVRALRAHLAFQRFRIVAAVANLRILEAEPKHERLLSQSEKDKVIEFLMSADGDDGVTWSDVAEELGIERECLSGTAKRGADGERPSSFPPTNSTNISIVRSKVKPLIEWWRKASDDEQATLVTALSNADELTDDQPSAETVRQFLSSPDEQSQEKIDKISLPKGRAAYSVNSLERLTRRMLKDSVDLFEARKREFGVDNNWTPTPDSIGEPVGNPAVDRVLKIVNRWLLAVTRKWGPPKVVNIEHVRVGFTSAAQTRKYEEENKTNRERNLAILEELRDKFGTSGKIRREDITRFAALRRQNCQCAYCGEAITFFDCEMDHIVPRKGPGSTNTRNNLVAICERCNKSKSNMPFSLWAQNCDIPGVSVEAVIDRVRTWIKDPELNPKQYNNFKKDVIERLRKTVDDDAIDNRSIESVAWMATELADRIGSHFRTAGANTKVRVYRGWLTSEARKASGFEGKINLIGGRGKTRLDRRHHAMDAATIALMRQSVAQTLVERASIRESDRLRRVVSSSWKDYRGADRDKQFSYGSWLNSMNALAELFNRAIDADGIPVTQNLRLRLGNGEAHDATIRSLEKKRVGASWTIGEIDRASTPQLWLALTRQEDFDQNDGLPANASRELRVKNHWFHAEENVTLFPTKSAAIAVRGGYAEIGNTIHHARLYKLPGKKLTYGMIRVFAIDLLCAWHTDLFSSPLLPESISLRTAETKVRRAVEDGAAMYIGWLVDGDEIVLDPETKAFKSNKIGEYLCEFPGTKRWKVDGFPDKEKLRLRPLQLAGEGLPEDVSAGTEEILGPKGNGWRVAINALFKSSQLVVVRRTALGMVRKLSRRHLPLTTRLRG

SEQ ID NO: 805 - protein, 1095 aa, Unknown
  Actinomyces sp. oral taxon 175 str. F0384
MPAHHLRVGIDVGTHSVGLATLRVDDQGTPIELLSALSHIHDSGIGKEGQKDHDTRKKLSGVARRTRHLLRNRRERLQQLDKVLVDLGFPIPKPEEYPDLSERTDPYRVWRVRARLVEETLPEELRGPAISMAVRHIARHRGWRNPYSKVESLLSPAEESSFMKALRKRIMTKTGEVLDDDITPGQAMAQVALTHKIYMRGPEGILGKLHQSDNANEIRKICARQGISSDVCKQLLRAVFKAESPRGSAVSRVAPDPLPGQGSFRRAPKCDPEFQRFRIISIVANLRISETKGENRPLTVDERRQVVAFLMEDSQADLTWVDVAEKLRVSRQALRGTAMLTADGERSAAQPPIDVTDQIMRKTKISALKTWWDKADAERRGAMVRYLYEGLEDSECAEVIAKLPEKDHAKLDSLHLPAGRAAYSRESLTALSDHMLETTNDLHEARKRLFGVDDSWAPPAEPVGAPVGNPSVDRTLKIVARYLSAVESIWGTPEVIHVEHVRDGFTSERTAEERDKANRSRHNDNQKAIEKIQHDYGKEGYISRGDIVRFHALKLQGSACLYCGTTIGYHTCQLDHIVPQAGPGSNNRRGNLVAVCERCNHSKSNTPFAVWAQKCGIPHVGVKEAISRVNGWVEHNHSTSSGDLTRLKKEVIARLRRTQKDPEIDERSMESVAWMANELHHRIAAAYPETTVMVYRGSITAAARKAASIESRINLIGEKGRKDRLDRRHHAVDASVVALMEPSVAKTLAERSSLRGEQRLTGQEQTWKQYTGLTVGARERFEAWRGHMHRLTELFNESLAADEVYVTQNIRLRLSDGSAHTVKASKLVSHRLGDGLTVQQIDRACTPALWCALTREIDFDEKNGLPAREDRVIRVHGQEISSADCIQVFSKRKKTKSDRDEAPFGAIAVRGGFVEIGSSIHHARIYRIEGEKPAYAMLRVFTHDLLSQRHGDLFSAVIPPQSISMRCAATELRQAISEGRATYLGWIVSGDELHIPVETFTTHKIGSFLKDYPNTTRWRICGYDSETMLILKPRILSAEGLNNSSDIAEYVIKNKGWRVAINKLAKVHPTVVRRDALGRPRHSSRSNLPVTWSIE

SEQ ID NO: 806 - protein, 1144 aa, Unknown
  Actinomyces sp. ICM47
MSMIDSSENVPGIRYRVGIDVGLKSIGFCAVEVDRNDQPVRMLNSMVFIHDAGVDPNENKAAKSRKLTAGVARRTRRLYRTRHQRLVNLDRVLSKEFGWPLPDLTSFKDPREPWHVRAGLLEGYIADDEKRKEALSIALRHIARHRGWRNPYAKVETLLQPSEPSDFLKGLNDRISEELGRAFPADATPGQLVDTYLAHPDYVGRAGTPKLRGPQGILAGKLHQSDNAQEIRGICDVQRIEPAERDRLIRVVFEAKSPKGSAKERGLVGYDELPGQGRHVRAEKAHPAFQLFRMVSVLANLRIREGREERPLTPDELEDLVDFINQVSLKQEVTWQDLADKLRIERADLRGTAKASFDGSPVLRNPPTDVTTEKIMACKVKWLKEWWKEADDEQRGYMVDAFSNSGGSEDGTDVNDEVAELLEQATEDDQLEFEKISLPQGRAAYSLDSLRRLTDRMLRDGVDLHTARRLEFNVGDDWKPAVEPIGAPTGNPAVDRVLKQVSRWLHAATERWGEPTVINIEHARDGLGSERVARELMRENEKRRKANASAVAEMAAKLKLSGKVHRSDQIRYFALQRQNCQCLYCGAPITYTTAEMDHIVPRADGSSTNDRSNLAAVCRTCNHMKGKIPFAVWASSDKANQGVSLTGALERVNMWQRDSGMSPRQLKQLQREVCARLKSKKPDQEFDGRSMESVAWMAVELRTRIEGFYRSRDEESVPSVGVYRGQLTAEARRASGFESRVNLIGGRGKTRFDRRHHAMDALVIALMNPSVSRTLALRLNMRDAQRLTGVEETWKHFYGKPGEASKRFESWRESMLRGVELFNIALSDNAIPFVENIRLRVGSSVIHDATVHSFCPPKTPDGKQIITKGYGEQHSLGSAMPVELIDRAETPALWTALTRCPDFDPKKGLPENPQRTISVNGTRVGPTELVNFFEFSKSGPKACLKVRGGYVDLSGAIHHARIYRIAGKKTAYAMIRVFQVDLLRLKDHDVFTTPLKPSTISMRTAEPKIREALANGTATQIGWLVEGDELVIDTSKYSGGFIGEVLARYPEATSWRVAGFMTPAKLRIKPILLSKEGFVDETQAALLGVEVTSEAIQKTVDRPGWLPAVNVLFGAGGVRVIRRNCLGEERYHSSASLPVSMTLE

SEQ ID NO: 807 - protein, 1103 aa, Unknown
  Actinomyces sp. oral taxon 181 str. F0379
MTKINDDLRYRVGIDVGLKSIGFCAVEVDENDQPLRLLNSMVFVHDAGVDPNENKAAKSRKLTAGVARRTQRGTAQNRRRLAELDRALSEELNWPLPNLEDFEDSYEPWHTRAELVEHYIKDDAERAEALAIAIRHIARHRGWRNPYLSVDSLLTPQEPSKFLRGLNERVTQALGREFPADATPGQLICAYIDSPKYAETQGIRGDSGILSGKLHQFDNVGEIRKICEVQRLDHDVFKLLVRKVFFAKSPRGSAAGLVGHDQIPGQGKYIRAEKAHPDFQLFRIVAVLTNLRIREGKAERCLTPDELRGLVDYILEVQLKQQVTWADLADNLGIERTDLRGTARASFDGSPALRFPPTDVTAEKIMASKVKWLKDWWDKADSERRGFMVDALSNSGGSTGDNDIDDEVAALLEAATEDEQAELEKIQLPQGRAAYSLDSLRRLTKRMLEEGVDLHTARKEEFNVDDDWRPEPEPIEAPVGNPAVDRVLKQVARWLNMATDRWGVPDVINIEHTRDGLGSEKVARELLRESQKRQDLNQKDMDKMIRELGISGKARRSSLIKYQAIQRQNSMCLYCGTEIGFETAEMDHIVPRALSGSTNDRSNLAAVCRACNHQKGAVPFAVWATSGEAHAGVSLEDAIKRVRLWQKGPGMSPKQHKAFQNEVISRLKSRKPDEEFDGRSMESVAWMAVELRTRIDGYYRKVNSDSVPKVGIYRGQLTAEARKASGFENRVNLIGGKGKTRFDRRHHAMDALVIAMMNQSVSQTLALRVNMRESQRITGQEETWKNFYGKPGQASERFEKWREGMLRAVELFNIELAKNAIPFHENVRLRVGSSKVHDDTVRKFIHAKLGEALSVAMIDCAETPALWTALTRLPDFDPKDGLPEDLSREIYIHSRKITADEQLNFFNSPSACLKVRGGYVEIGSSIHHARVYRIDGKKTTYSMVRVFATDLVKMTHEDVFTTPLKPSTISMRTADPKIRKALADGTATQIGWLVEGDELQLETDKYSGGLIGEVLAEYPQLTSWRVAGFYGVTQLRLRPYMLAAEGIPSDASESLRKVIEGKGWLPAINALLSSGCVKVVRRNCLGEPRFNAKSSLPVSQLLR

SEQ ID NO: 808 - protein, 1114 aa, Actinomyces turicensis
MQFHFYMVYVTMKGMNDKDASQQLRYRVGIDVGTHSIGFCAVEVDESGMPIQLLNSMVHKHDSGIDPGGNDTATTRLAEAGVARRTRRLIRRRKKRLQELDAFIEECGWPLVDLATITDARSPWRIRAHLATEHIDDEAEQGKLLSIALRHMARHRGWRSPYARISSLHIQADPSEQLKALAQRVSEKTGISLTADQTPAQLISVYLDVFETGKLRGPEGILGGKLMQSDNANELRRIATVQGLDNDLLKKIIGFVFAAESPKGSAAKRVGKDVLPGAHGLRAEKAHPAFQQFRIVSIVQNLRIKEGTGLRALTSEETEIVVDFLNQAGLTEAPTWEEVADNLEIPRSHLKGTATEGFDGIAPSTRPPFDVTSQKILNGKLKKLSAWWKDADYDHRCAMVNALSNVGSDDEGSLADDDVREFLSDFTDEELEALDKVELPGGRAAYSVDSLEKLTNTMLSEGCDLHSARKIAFGVDDSWTPPAEPIGQPVGNPAVDRVLKQVARWISAATNQWGTPESVNIEHVRDALGSEKASREYQRSLQTRRIRNEKLFAEMRERLDIGGKPRRSELTRYLALQRQNCQCLYCGMPITYTDAEMDHIVPRKGAASTNTRENFAAVCRACNHQKSNLPFAVWAEKTERPGVSVKEAYKRVSDMRIEPGMNGRQMNEFRKAIRLRLTTKHADAEIDGRSLESVAWMANELRHRIEGFYRSAENDVTVRVFRGAVTAEGRRASGFESRVNLIGGKGKTRLDRRHHAMDALTIALMEPGIAQTIALRMNMRESQRVLGEQETWKSFTGGSDTARKRWEHWCEEMLRASELFNVFLAEDRIPICQNKRLRLGSSAVHKAIVQPFEASDKRIVSDAMPVELIDRASTPALWTALTRDPDFDPKEGLPANPSRTIRLHDKRLGPNETVEFFPTAAACLAIRGGYCEIGAGIHHARIFRISGKKTTYAMLRVYQCDLVRFQKENLLTVELPANTISVRTAVPKLREALAHGTAEQIGWLVVGDELKIDLSGFTTGQIETFNETYPQATRWEVTGFPTKTQLRLKPLLIASEGLADDVPDDIVKIVKGPGWWPAIDKLLKIGNVVLYRRDTHGKPRVVSHRSLPLSSKLQ

SEQ ID NO: 809 - protein, 1113 aa, Unknown
  Alcanivorax sp. W11-5
MRYRVGLDLGTASVGAAVFSMDEQGNPMELIWHYERLFSEPLVPDMGQLKPKKAARRLARQQRRQIDRRASRLRRIAIVSRRLGIAPGRNDSGVHGNDVPTLRAMAVNERIELGQLRAVLLRMGKKRGYGGTFKAVRKVGEAGEVASGASRLEEEMVALASVQNKDSVTVGEYLAARVEHGLPSKLKVAANNEYYAPEYALFRQYLGLPAIKGRPDCLPNMYALRHQIEHEFERIWATQSQFHDVMKDHGVKEEIRNAIFFQRPLKSPADKVGRCSLQTNLPRAPRAQIAAQNFRIEKQMADLRWGMGRRAEMLNDHQKAVIRELLNQQKELSFRKIYKELERAGCPGPEGKGLNMDRAALGGRDDLSGNTTLAAWRKLGLEDRWQELDEVTQIQVINFLADLGSPEQLDTDDWSCRFMGKNGRPRNFSDEFVAFMNELRMTDGFDRLSKMGFEGGRSSYSIKALKALTEWMIAPHWRETPETHRVDEEAAIRECYPESLATPAQGGRQSKLEPPPLTGNEVVDVALRQVRHTINMMIDDLGSVPAQIVVEMAREMKGGVTRRNDIEKQNKRFASERKKAAQSIEENGKTPTPARILRYQLWIEQGHQCPYCESNISLEQALSGAYTNFEHILPRTLTQIGRKRSELVLAHRECNDEKGNRTPYQAFGHDDRRWRIVEQRANALPKKSSRKTRLLLLKDFEGEALTDESIDEFADRQLHESSWLAKVTTQWLSSLGSDVYVSRGSLTAELRRRWGLDTVIPQVRFESGMPVVDEEGAEITPEEFEKFRLQWEGHRVTREMRTDRRPDKRIDHRHHLVDAIVTALTSRSLYQQYAKAWKVADEKQRHGRVDVKVELPMPILTIRDIALEAVRSVRISHKPDRYPDGRFFEATAYGIAQRLDERSGEKVDWLVSRKSLTDLAPEKKSIDVDKVRANISRIVGEAIRLHISNIFEKRVSKGMTPQQALREPIEFQGNILRKVRCFYSKADDCVRIEHSSRRGHHYKMLLNDGFAYMEVPCKEGILYGVPNLVRPSEAVGIKRAPESGDFIRFYKGDTVKNIKTGRVYTIKQILGDGGGKLILTPVTETKPADLLSAKWGRLKVGGRNIHLLRLCAE

SEQ ID NO: 810 - protein, 1146 aa, Alicyclobacillus hesperidum
MAYRLGLDIGITSVGWAVVALEKDESGLKPVRIQDLGVRIFDKAEDSKTGASLALPRREARSARRRTRRRRHRLWRVKRLLEQHGILSMEQIEALYAQRTSSPDVYALRVAGLDRCLIAEEIARVLIHIAHRRGFQSNRKSEIKDSDAGKLLKAVQENENLMQSKGYRTVAEMLVSEATKTDAEGKLVHGKKHGYVSNVRNKAGEYRHTVSRQAIVDEVRKIFAAQRALGNDVMSEELEDSYLKILCSQRNFDDGPGGDSPYGHGSVSPDGVRQSIYERMVGSCTFETGEKRAPRSSYSFERFQLLTKVVNLRIYRQQEDGGRYPCELTQTERARVIDCAYEQTKITYGKLRKLLDMKDTESFAGLTYGLNRSRNKTEDTVFVEMKFYHEVRKALQRAGVFIQDLSIETLDQIGWILSVWKSDDNRRKKLSTLGLSDNVIEELLPLNGSKFGHLSLKAIRKILPFLEDGYSYDVACELAGYQFQGKTEYVKQRLLPPLGEGEVTNPVVRRALSQAIKVVNAVIRKHGSPESIHIELARELSKNLDERRKIEKAQKENQKNNEQIKDEIREILGSAHVTGRDIVKYKLFKQQQEFCMYSGEKLDVTRLFEPGYAEVDHIIPYGISFDDSYDNKVLVKTEQNRQKGNRTPLEYLRDKPEQKAKFIALVESIPLSQKKKNHLLMDKRAIDLEQEGFRERNLSDTRYITRALMNHIQAWLLFDETASTRSKRVVCVNGAVTAYMRARWGLTKDRDAGDKHHAADAVVVACIGDSLIQRVTKYDKFKRNALADRNRYVQQVSKSEGITQYVDKETGEVFTWESFDERKFLPNEPLEPWPFFRDELLARLSDDPSKNIRAIGLLTYSETEQIDPIFVSRMPTRKVTGAAHKETIRSPRIVKVDDNKGTEIQVVVSKVALTELKLTKDGEIKDYFRPEDDPRLYNTLRERLVQFGGDAKAAFKEPVYKISKDGSVRTPVRKVKIQEKLTLGVPVHGGRGIAENGGMVRIDVFAKGGKYYFVPIYVADVLKRELPNRLATAHKPYSEWRVVDDSYQFKFSLYPNDAVMIKPSREVDITYKDRKEPVGCRIMYFVSANIASASISLRTHDNSGELEGLGIQGLEVFEKYVVGPLGDTHPVYKERRMPFRVERKMN

SEQ ID NO: 811 - protein, 1552 aa, Unknown
  Anaerophaga sp. HS1
MFSQRNNPYCELLQNVKQLYKEKFGKTNQVDNSIIYGFMKRILGLDLGTNSIGWALVENDENDRKGKIIGMGSRIIPMDMSELDNFNKGASISKTAERTRLRMTRRLRERHLLRRARLHRILNIMGFLPEHYRNSIDFIDKKGCFFEGQEPKIAYKPDKNSEQFCFLFTSSFHEMLEDFRKFQPELIQNRKKVPYDWTIYYLRKKALTQKISKEELAWIILNFNTKRGYYHLRGEDEDNQDNKKIKEFRALKVVNVTEREGANSSGKKWYDMELENGWVYSRQSNLPPNLEGKTIELIVSYTLDNNGNIKKDKNGKEKYSLSMPGEEDWNLVKIKTENDLKTSKKSVGEYIYDHLLKNPDQKIRGKLISTIERKFYKEELSRILKTQMNFYEELKNRELYQKCVEELYPNNKSHQQTLLQKDFIHLIVEDIIFYQRPLKSKRAFVNNCPLEYRVYVDKKSGELIKSGVKCIPKSHPLFQEFRLWQYVRNLRIYERERMVNGRLMVNVDVTNELLPDEEHIVRLFDLLNDRKSFKQDDVLRFVGIKSPKDRKRYSWNYPEDKELPGNETRHLILAWLKKVDGVPEDWLDPEKLKALWHLLYSVTDREEIIKGLHSFAKKYELPDTFVEHFKKIPRLEREYGSFSEKAIKKLLPLMRMGKYWKAEEIPADLLEKAQKIIDAEADDRISDEVREKLLHLKDISQLKGLPLWQASYLVYGRHSETGEVVKWRTSEDLEKYILQFKQHSLRNPVVEQVILEALRVVKDIWEHYGEGKEGFFNEIHVEIGRELKNPADKRKKITSQIQENENTNLRIKALLEELFNDPSVKNVRPYSPAQQEILRIYEDGVLNGQKEIPDDILKISKMARPSKSQLVKYKLWLEQKYRSPYTGEIIPLSQLFTSAYEIEHIIPQARYFDDSFSNKVICEAEVNREKGHQLAFEFITKRGGDEIELNFGKKVTILNVEEYQKFVKDHYGRSLRSLSKMRKLLMEDIPDDFIDRQLNDSRYISKVVRNLLSNIVRAEDENSLVSKHLITCTGGVTTRLKHEWGLNDVWNELITPRFVRLNKMGKEKFGEWINKKGKQVFQIQMPLELQKGFNKKRIDHRHHALDALVVACASRSHVNYLNNDSARANASETRYDLRNKLCYKDKTDSNGNYRWKFYKPWESFTEEAKNRLAGTVVSFKSNRRIMTRSSNRYFKWVDTSEGKKKKLVRQIKGDNQAIRKPLHKDTVLGKVSLRKEKKVSLSKAIDLWESIVDKPLKKRIQSLREQGYDKKLLLKYFKDRNNQFNGQDISRVNIYFFDNNLAARRVTLDASFNSEKRIDGITDSGIKKILYAHLQNEKYHGKKDEKGNEISPYELAFSPEGLEEMNANIKKLNGGKPHCPIYKVRLAETIGEKFKLGEKGNKNKKYVEAAKGTNLFFAVYVDEKGVRSFETIPFSVALERRKQKLAVVPEENENKEKLLFYLSPNDLVYVPDEDEKLIDYRQLSINPTRIYKMVSSSGTQCFFIPHFVASPIVQTMELGPNNKSERAWDGQMIKNVCYKLSVDRLGNVKIEK

SEQ ID NO: 812 - protein, 1515 aa, Anaerophaga thermohalophila
MKRILGLDLGTNSIGWALVESDEEQKSGKIQGIGSRIIPMDQNELDNFNKGNTVSQTAERTRLRMVRRLRERHLLRRERLHRVLKEIGFLPEHYLEQIDFTEKPGGFLPGKEPKIAYKPDNFKDKYDFLFQDSYHEMLSDFQDKNPEFIQKRKKVPQDWTIYYLRKKALTAKITKEELAWIILNFNQKRGYYQLRGEDEDVAKNTKKEEFHALKVVKVKEREDSEGASGKWYDIELENGWVYPRQSNIRPDWEGKILELIVTYNLDKDGNIKTDKEGNEKRSFRMPNKDDWTLRKKRTENEIEKSGKTVGEYIYDNLLDAPDLKIRGKLVSTIERKYYRSELEQILTAQKKYHPELSNSELFNKCISNLYPNNDIHRKALLSKDFVHLIINDIIFYQRPLKSKRSTVSNCPLEYRVYVDKVTGEKKKVPLKCIPKSHPLYQEFRLWQYVKNLRLFEKERFENGRLLTNVDVTEQFLPDEDKYVELFEFLNGRKTFKQDDILKFAGIKSAKDRVKYYWNYPQEKEYPGNETRYLIESRLKKIENVPDEWLNYEKIEELWHLLYSVTDKVEIEKGLQSFAAKYQLPDLFVEVFKGFPRMEREYGAFSKKAIKKLLPLMRMGKYWKLENINPDLIEKVQKIIDGEADDNINDGIRERFSEINEMSDLRGMPLWKASYLVYGRHSEAAEVIRWRTSADLDQYIKDFKQHALRNPIVEQVVLEALRVVKDVWNYFGEGREKFFDEIHVEIGRDLKNPADKRQKIANQIQENENTNLRIKALLVELFNDPEVQNVRPYSPVQQQLLKIYEDGVLNAERDIPDDIQKISRMANPTRNQLIRYKLWLEQKYRSPYTGEIIPLNKLFTSEYEVEHIIPRARYFDDSFSNKIISEAEVNRKKDRMLAFEFIKKLGGSTIDLNYGKKVSVLTVEEYQQFVKDHYGINPHSRLKMQKLLMDEIPESFIERQLNDSRYISKMVRNLLSNIVREENENSPVAKQLITCSGSITNTLKQEWGLNDVWNTIITPRFERLNKMGEQKYGEWVNKEGKPVFQIQMPLELQKGFNKKRIDHRHHALDALIVASATRSHVNYLSNEAAKTNAKDTRFDLRNRLCYKEKRGQNRNFTWRFYKPWNTFTEDAKNALNDIVVSFKSNHRVINKSTNRYFKWENLPGGMKKKRLVRQEKGDNWAIRQSLHKDTVLGKVSLRKVKPVSLSVALDSWNNIVDKALKKKIRSLKDQGYDKKLMLKYFKDRRNEYNGENISRVNVYYFDEEMAARRVDLDTSFNSEKRIEGITDSGIKKIIYAHLKNEKYHGQKDDKGKDISPYELAFSPEGIAEMNANIKQLNGGKPHCPIYKVRLAEPVGEKFQLGETGNKTEKLVEVAKGTNLFFGVYANDEGVRSFATVPFYLAVEREKQGLPAVPQENENGDQLLFWLSPNDLVYVPSEEDAHFANPKQIELDNSRIYKMVSSTGTQCFFIPHFVATPIVQTIELGPNNKSERAWDGQMIKKVCYKLSVDRLGNVEIE

SEQ ID NO: 813 - protein, 333 aa, Bacillus cereus
MMNPNNFTKEDFWRTIILYGLNQATYKIALGQSLIRFSEQQRNVVSMNELAEDFFDMYLERLKNGKPQLATPNRQTAMERIINSYNIGRLTRSQAIEKVEREAFNDVIDRFHTVDSLQVPMKFYEKTDKGIVIFDNVFEIFSDNNNFELRNELDARWDLLESAFEIKRTDSQLVNDIRKLYLANGYERTDITKNRSVLNGYQSNVCFYCGELMSDDDVHVDHVIPRQLINHDDIWNLVLSHGFCNQQKSDNLPDVNYIEKLIERNEYFIKSNHPISNKLKERLGNTPRRRRTTIDRIYEHAKLVLAPWKGIYGYNPATDPFYKTFIRNIVLSK

SEQ ID NO: 814 - protein, 1068 aa, Bacillus cereus
MRYVLGLDIGIASCGWAVINQEKERIEDLGVRIFDKAENPKDGKSLAAPRRDARSTRRTLRRKKHRMQRIKILLVKQGLLFKTELNHLYESATEFDVWNLRLDALERKLHPKEFARVLIHLAKRRGFKSNRKETTLSENGQILESISENQQIMEQQNYRTVGEMILKDKKFENHKRNKDGTYIGTVTRQQLQDEIQMIFHTQRLYKNDYATEEFESSYLEIWASQRPYASKDQIEKMIGYCTLEPKEKRTPKASWSFQYFVALQTINNLRLISKDKIEELSFEEKKQIMNLALEKPIVKYIDIRKLLSIPNDFQFNSLSYSADTVDTTLENKRCIELKEYHSINKVYKQVYGKNTPNLLPIDYDTIAYGLTIFKDDKDILEYLQNKYVNAKGKPIKNLAKKTYDDTFIQALLNLNFTKMGHLSFKALKNIIPFLEEGLSYDKACEKAGYNFKGTSYTERTKYLPVIPQNTNPVVHRALSQTRKVINAIIKKYGSPNAIHIETARELSKTFQERKEIDSRYQDNSKKNEHAIHKLKELGNINPSGINIVKFKLWSEQDGRCMYSGKYIEPHRLFEEGYTEVDHILPYSRSLDDSYNNKILTLGTENQRKGNKTPYEYMGNTSIWDEFETRVQSNKKINFKKQQKLLLQNFSYAREQEFIERNLNDTRYATIYLTSLIQQHLIFSESSSKKKVRTVSGIITSHLRSRWGFNKDRKEGHIHHALDAVIVAVTSNHMIQRVTKYYKLKELNKNLQAKQLPFPEPWEGFRLELEARISPNTQQYLKGIHFKNYADVNLSDIKPIFVSRMPKRSITGELHQETIRKFLGYNEKGKVLTAIKTKLEDIPFDANGDFPMYGKETDLYTYNAIKERYLSHEKDKRKSFQEPLYKPTKSGEIGPLIKSIKIMDTRTIVNPVNQGKGVVYNSKIARTDVFKKEDKYYLIPIYTIDLLKNILPHKAITAGKGYEDWTTIDSSFTFLFSLFPNDLIQIVPSKNKTIKARTTVSKKEILLPSLTGYFKGVHSGTAGITVETHDGSVIANVGSKQLLLFEKYQVDVLGHYTKIKEEKRMGMAI

SEQ ID NO: 815 - protein, 1078 aa, Bacillus cereus
MRYVLGLDIGIASCGWAVINQEKERIEDLGVRIFDKAENPKDGKSLAAPRRDARSTRRTLRRKKHRMQRIKVLLVKHGLLSKTELDHLYESATEVDVWNLRLDALERKLYPKEFARILIHLAKRRGFKSNRKETTLSENGQILESISENQQIMEKQNYRTVGEMILKDKKFENHKRNKNGTYVGTVTRQQLQDEIQMIFHAQRLYKNDYATEEFESSYLEIWASQRPYASKDQIEKMIGYCTLEPKEKRAPKASWSFQYFVALQTINNLRLISKDRIEELSFEEKKQIMNLALEKSIVKYIDIRKLLSVPNEFQFNSLSYSADTVDTAVESRKCIELKEYHSINKVYKQIYGENALNLLPKYYDTIAYGLTIFKDDKDILEYLQNKYVNAKGKPISNFANKTYDDTFIQALLNLNFTKMGHLSFKALKNIIPFLEEGLSYDKACEKAGYNFKGTSYTEQTKYLPVIPQNTNPVVHRALSQTRKVINAIIKKYGSPNAIHIETARELSKTFQERKEIDSMYQDNSKKNEHAIHKLKELGNINPSGINIVKFKLWNEQDGRCMYSGKYIEPHRLFEEGYTEVDHILPYSRSLDDSYNNKTLTLGTENQRKGNKIPYEYMGNTSIWNDFETRVQSNKKINKKKQQKLLLQHFSYAREQEFIERNLNDTRYATIYLSSLIQQHLIFSESSRKKKVHTVSGIITSHLRSRWGFNKDRKEGHIHHALDAVIVAVTSDHMIQRVTKYYKLKELNRNLQAKRMPFPEPWEGFRLELEARISPNTQQYLKGLRFKNYADVNLSEIKSIFVSRMPKHSITGELHQETIRKFIGYNEKGKVLTAIKTKLEDIPFDANGDFPMYGKESDLYTYNAIKERYLSHKKDKRKSFQEPLYKPTKSGGIGPLIKSIKIMDTRTIVNPVNQGKGVVYNSKIARTDVFKKEEKYYLIPIYTIDLMKNILPQKAITAGKGYEDWTTIDPSFTFLFSLFPNDLIQIVPSKNKTIKARTTVSKKEVLLPSLTGYFKGVHSGTAGITVETHDGSVIANVGSKQLLLIEKYQVDVLGNYTKIKEEKRIGLTTYNDNKKIAAC

SEQ ID NO: 816 - protein, 1088 aa, Bacillus smithii
MNYKMGLDIGIASVGWAVINLDLKRIEDLGVRIFDKAEHPQNGESLALPRRIARSARRRLRRRKHRLERIRRLLVSENVLTKEEMNLLFKQKKQIDVWQLRVDALERKLNNDELARVLLHLAKRRGFKSNRKSERNSKESSEFLKNIEENQSILAQYRSVGEMIVKDSKFAYHKRNKLDSYSNMIARDDLEREIKLIFEKQREFNNPVCTERLEEKYLNIWSSQRPFASKEDIEKKVGFCTFEPKEKRAPKATYTFQSFIVWEHINKLRLVSPDETRALTEIERNLLYKQAFSKNKMTYYDIRKLLNLSDDIHFKGLLYDPKSSLKQIENIRFLELDSYHKIRKCIENVYGKDGIRMFNETDIDTFGYALTIFKDDEDIVAYLQNEYITKNGKRVSNLANKVYDKSLIDELLNLSFSKFAHLSMKAIRNILPYMEQGEIYSKACELAGYNFTGPKKKEKALLLPVIPNIANPVVMRALTQSRKVVNAIIKKYGSPVSIHIELARDLSHSFDERKKIQKDQTENRKKNETAIKQLIEYELTKNPTGLDIVKFKLWSEQQGRCMYSLKPIELERLLEPGYVEVDHILPYSRSLDDSYANKVLVLTKENREKGNHTPVEYLGLGSERWKKFEKFVLANKQFSKKKKQNLLRLRYEETEEKEFKERNLNDTRYISKFFANFIKEHLKFADGDGGQKVYTINGKITAHLRSRWDFNKNREESDLHHAVDAVIVACATQGMIKKITEFYKAREQNKESAKKKEPIFPQPWPHFADELKARLSKFPQESIEAFALGNYDRKKLESLRPVFVSRMPKRSVTGAAHQETLRRCVGIDEQSGKIQTAVKTKLSDIKLDKDGHFPMYQKESDPRTYEAIRQRLLEHNNDPKKAFQEPLYKPKKNGEPGPVIRTVKIIDTKNKVVHLDGSKTVAYNSNIVRTDVFEKDGKYYCVPVYTMDIMKGTLPNKAIEANKPYSEWKEMTEEYTFQFSLFPNDLVRIVLPREKTIKTSTNEEIIIKDIFAYYKTIDSATGGLELISHDRNFSLRGVGSKTLKRFEKYQVDVLGNIHKVKGEKRVGLAAPTNQKKGKTVDSLQSVSD

SEQ ID NO: 817 - protein, 1069 aa, Bacillus thuringiensis
MNYDIGLRIGITSCGWSIINKDLERIEDLGVRVFEKAENPDGTASAAPRREARKSRRKHRRKKHRIERIKRLIVQHDLLSKKELDSLYLSPFNIDVWNLRVEALERKLDNREFARVLIHLVQRRGFQTIRKSVEIQEEGKLLENVSENERIMKVNGYKTVGEMFSKHEKFTHHKRNKDGSYTSVVTRSLLLKEIKTIFNSQRILGNVFSTQKLESDYLYIWGSQRPTLTYEQLMSMVGNCIYEKKEKRAPKTSWAFQYFSLLQKINKLKVSDDNTLRKLSKEERDIVIELAFKKKNVSFVDIRKALKLNDNTKFNHLTYSHVVETKKVEKATFIELKGYHLIKKQLKDRNVELTQELQPKDYDAIAAASTFFKNDIEFRDYLRNQYLDSNGKRKSNIANKVFEDKVIAAVFELNFSKVCHLSFKSLYKLIPHLEKGLDYKEAILCAGYNFRDENKRDKKLFLPVIQQETNPVVHRALTQARKVINAIIREYGSPNTIRFVVANDLAKTYKQRKELESTLKKNRAENEKIKTKLLSMGIINPTGMDIVKYKLWYEQSGICLYTGRQMELSSLFKPGYSIVNHIIPYNRSFDDTYHNRVLTLTETKYEKGNKIPFEYFGAEETCWNEYEKRVSTSKKIHDKKREKLLIRNFDIEYENEMISNNVFDTHYIGSYFEKYIDEHLQFKKSTKKQKVFSIHGNMVAHLHSRWGFNKNSREIYLNHAVDAAIVAVLTDQLIRNIADYYRRDNILEQKGSLKFPEPWKSFSIELEARISPQVRDLIKKLNLDSYLDVDILHIKPVFISKKPRRKVNGEAHKSTIRSLIGINEIGKTVTCIKTRLEDIPFDENGDFPMYGKDTDKYTYTAIKERYLEFNKDKEKAFSTPLYKLKRNGEPGNQIKSVKIIDTRNIVNKVNQGKGIAYNSNIIRVDVFSRDQKYYVVPIYLRDFIKGSLPNKIITAAKGFMQWPETDNSYTFLFSIFPNDLIKVVPKEGKFIKAKNENKENINLTEILGYFKGLDSSTGAFTLESHDGSLLARGIGTKNLLLIEKYQVDVLGRYNKVGNEERQDIKIQQN

SEQ ID NO: 818 - protein, 206 aa, Bacteroides cellulosilyticus
MKKILGLDLGCNSIGWALVNEAENTEEISSIIKLGVRVNPLTVDEMQNFEKGKSITTNADRTLKRSMRRNLQRYKLRRDTLIEVLKEHGFITDSTLLSEHGNKTTFETYRLRAKAAVEEISLEKFARVLLMINKKRGYKSSRKAKGSEDGVLIDGMDVARKLYEEGLTPGELCLQILEAGKKNLPDFYRSDLQNEFDRIWNFQKLV

SEQ ID NO: 819 - protein, 349 aa, Bacteroides coprosuis
MKKILGLDIGTNSVGWAVVNTNQEGEPSQIEKLGSRIIPMSQDILDKFGQGQTVSSTASRTDYRGIRRLRERSLLRRERLHRVLHILDFLPKHYADSIGWDPRNSKTYGKFLPGTEVKLAWVPTADGHQFLFYSTYLEMLEDLKQTQAQLFETSQTPVPLDWTIYYLRKKALTQPITKHELAWLLLHFNTKRGYYQRRGELEDTPTDKLVEYHALKVVDVEVDPEDQSKKPWYFVHLENGWIYKRQSSEPLDNWKGLVKEFIVTTHLDKEGKPKLDKEGEVRRSFSSPKEDDWTLVKKKTENDLEKSGLTVGAYIYQTLLNKPNQKIRGGLIKHIERNYYVEELEQILR

SEQ ID NO: 820 - protein, 1504 aa, Bacteroides coprosuis
MKKVLGLDIGTNSVGWAVVNQNDKGEFLSIEKIGSRIIPMSQDVMDKFGAGQTESSTAQRTQYRGVRRLRERSLLRRERLHRVLHILHFLPQHYDAAIGWNKKENKTYGKFLPGVEVNIPWVATDQGHQFIFMDSYAEMLKDLKQHQPHLFEKSSTPVPLDWTIYYLRKKALTQAISKEELAWILLNFNQKRGYYQLRGEEVEDNTKREEFYALKVVKVELDKDNTSAKTWYKVHLENGFIYPCPSDTPIDSWVGMVKDFIVTTTLEKDGSEKRTADGEIKRSFRAPKEDDWTLLKKKTESELEKSGKQVGAFIYDTLLSNPDQKIIGGLIKTIERKYYKKELEQILETQQKFIAELSDKKLFQACAEELYPLNDSHRENLLERDFKHLFVQDIIFYHRPLKTKKSLISNCTYEYRTFYKNGEKQISPIKCIAKSNPLFQEFRVWQFVQNLRILQRQRSEGDSIKYNVDVTAEFLKDENDIANLFTWLNERKVIKQDQLLKSYFKLKVNKETKELDYRWNYVDDKNKEYPCNATRTHILSFLEKCKEEKRIEDDRFVYSLWHLLYSVVEPIELRGALAKFAEREHLHPSFVDVFAQFPPLEKEYGSYSEKAIKRLLPLMRMGDYWHEDKIDVKTKQRIQRIIDGEADDDITHRSREKVENLRSITDFKGLPLWKAGYVVYNRHSESGELTKWKTPHELSNYIQNEFKQYSLRNPIVEQIVLETLRVVHDLWVKHGDFSEIHLELGRDIKNSSDKRKRMAERQQENENSRQRVLEMLIDLKKEAAFADLNPYSPSQQEKLRIVEDGVLRSNIEIPKDIEKITKSAKPTSRELTKYRLWLDQKYRSPYTGQPISLAQLFTSKYEIEHVIPQAKYFDDSFTNKVICESEVNKEKGSMLAHEFILKNGGSTVNVGGRQVQVLKNDAYVELINRLYGKNNPVKAKKLLAEDIDEVVGDFSERQLNDTRYISRVVQKLLSNIVREEDEQESTSKHVIGCSGQVTTALKKDWGLNDIWNKIIQPRFERLNEMTATEDYGVWQSPNHFQIRVPEEIQKGFTKKRIDHRHHAMDALVIACATRSHINYISNRSGQDRNAKFETTRTDLRSKLCYKENSSGNNYNYIFNKPWDTFTQDAHRALENIVVSHKQNLRVLTKTNNYTQFINKDGKKDLQKQVKGDHFAVRKPMHQETIYGRVSIRSIKEVALKKALENWKQIVDRTLKDKIRELIGAYGKYDAQTILKYFKDRDYKFNNLKINRVEVYEYDHNCAAVRKSIGDDLTIKQIERITDESIRKILMNHLSNYDDNLKEAFSPEGLMEMNKNIKELNGGKNHQPIYKVRLFEDLGSKFPLGVSHNNPDKYAIAAKGTNLFFGIYEDQEGKRMFDSIPLNIVIDRLKEKKSPVPETYNESKLKFHLSPNDLVYVPTDEEQKQPELVDVDHLSDEQKGRVYKAVSFTGNRAFFVNHRVSKVIHDYVEFGTKNKIENDDDKRSLKHICWKLKVNRLGEITDVKR

SEQ ID NO: 821 - protein, 1509 aa, Bacteroides eggerthii
MKTILGLDLGTNSVGWAVINSVIKEQAERIWIEMAGSRIIPMDAAVLGDFDKGNSISQTSERTRLRGARRLRERQLLRRERLHKVLNILGFLPNHYLEYIDFEKHPGKFLADAEPKLAWVKDEQGKYTFLFQAAFDEMLADFAIHQPSLVSGDKKIPYDWTIYYLRKKALTEMISKEELAWILLNFNQKRGYYQLRGEEEEDNAGKSVEFYALKVLTVEATDEKKGRDVWYNVHLENGWIYRRSSSVPLDWEGQVKEFIVTTDLNPDGTPKLDKYGEVKRSFRAPKEDDWMLIKKRTEADIANTHKTVGAYIYDTLLQKPQQKIIGKLVKTVERKLYRDELSLILQKQCAFHAELQDRALYARCVEALYPSNEVRRKNIANRDFVYLLMDDILFYQRPLKTKKSLIANCPYEENEYVDRETGEIKKTPLKCIAKSHPLFQEFRLWNFLSNIRIYQKEKEINGTLHLDVDVTAEFLKTEDDYVALFDWLNSRKEIEQKTFLKYPKFGLKKEISNYRWNYVEDKQYPCNETRHAILSSLEKANVCIDFLSNEKEVALWHILYSVSDKQEIEKALRTFAAKNGLDESFVEAFKKFPPFKSEYGAYSAKAIKKMLPLMRCGKYWDVSSIDDTTKERIKKIVTGEYDERISVKVRDKVMNLSDISCFRRLPLWLACYIVYNRHSEDKEAVKWESPADIDAYLASFKQHSLRNPIVEQVITETLRVVRDIWKQVGRIDEIHIELGREMKNPADKRKRMTAQILENENANLRIKALLAEFMNPEYEIENVRPYSPSQQEILRIYEDTVLHAEDQLPEEIDAILKKFNSSKVPTKSEFLRYKLWLEQKYRSPYTGELIPLGKLFTAAYEIEHVIPQSRYFDDSFSNKVICESAVNKLKDNQLGYEFIKNHHGQKVEVGFGKSVEIFSVDSYERFVKEQYAKSAVKMKKLLMDDIPEQFIERQLNDSRYISKVIKGLLSNIVREKNDSGEYEPEAVSKNIVVCTGSVTDRLKRDWGMNDVWNSIVYPRFERLNSLTDTQSFGHWENKSGKKVFQTELPLEYQKGFSKKRIDHRHHAMDAIVIACATRNHVNYLSNESASRNAKISRYDLQRLLCDKNRTDDNGNYKWVIKKPWDTFTQDAREVLSKIVVSLKQNLRIINKTTNVYRHLDATGNRVYEKQKTGDSWAIRKPMHKDTVFGAVNLRKVKVVRLSVALDTPAMIVDKRVKNKVFELLSYKYDKKRIEKYFKENAFLWKELDLAKVAVYYFTEATTEPLVAVRKPLDSTFNEKKIKESVTDTGIQKILLNHLCTKEGKPDLAFSAEGIEEMNRNLLQLNNGKSHQPIYKVRVYEPRGNKFSVGVLGNKGTKWVEAAKGTNLFFAIYITEDGKRTYETIPLNVVIEREKQGLVPVPDRNKKGDKLLFWLSPNDLVYLPTEEEREFGRINEPIDRGRIYKMVSCTGNEGHFIPANVANPIVPVIELGSNNKAQRAWTNEMIKDICIPIKVDRLGHIIEVKYRIDE

SEQ ID NO: 822 - protein, 1526 aa, Bacteroides faecis
MKKILGLDLGTNSIGWAVLNAADDNSLKYIEAAGSRIIPMDAAILGDFDRGNSISQTAERTRIRGMRHLRERYLLRRARLHRILNLLGFLPFHYAQDIDRYGNFSADMEPKIAWCKNLEGELEFIFIESFNEMLEDFRKNQPELVADNKKVPYDWVIYYLRKKALEKKISKEELAWILLNFNQKRGYYQLRGEDDDESMKTAKTRQYFDKQIIKNIIDTNQTYKGQRILIVELQNGDKGKIFKKEIPDWIGQEKNIIVTVDIDKDGNDKYEESGSLSCRFKIPTDAEWESEWKLIKMKTQKDLDESNKTVGTYIYDSILQNPTQKVRGKLVRTIERKYYKAELKQILEKQTEFHSELQDKDLYIECLNELYSNNDTHRNAITDRDFVYLFMNDILFYQRPLKSKKSLIDNCPYERNIYIDKETGEIKYSPIKCIAKSHPLFQEFRLWKFISSIRIYQRESVVEVVDKQLDLFSSQSTSVQKLVTDVDVTDKFLTCENDYVALFEWLNKKKIIDQKEFLKYRPFGLKGDIDNYRWNYVEDKSYPCNETHAMILTYFAKAGISEDILTKEMEEALWHILYSVEDRQEITKALRTFASKYHLSDSFVKVFSNIPPFKKEYGSYSAKAIKKLLSLMRMGKYWSEDAIDVNTRERIDKIVTGEYDEKIRDRVREKTIRLNDIRHFRALPDWLACYVVYDRHSETREITEWKSPEEIDEYIRNFKQHSLRNPIVEQVITETLRTVRDIWKQVGCIDEIHVELGREMKNPADKRKRITSQIIENENANLRVKALLTEFVNSEFEIENVRPYSLSQQDILRIYEDGVLNSVAEVPGDIAGILKKFNENDAKKRPTTSEILRYKLWLEQKYRSPYTGEMIPLSKLFTSAYEIEHVIPQSRYFDDSFSNKVICEAEVNKLKDNALGYEFIKKHHGEKVELGFGKIVEIFSVSVYEQFVKDNYSRNRGKMKKLLMDEIPEQFIERQLNDSRYISKVVKTLLSNVVREKAEQEAVSKNVIVCTGGVTDRLKKDWGINDVWNKIVLPRFLRLNELTNSTNFTAKNAAGNEIPAMPLELQKGFNKKRIDHRHHAMDAIVIACANRNIVNYLNNESASRKAKISRHDLQAILCDKVRTDDKGNYQWRVKKPWDTFTQDVYVALENIIVSFKQNLRVINKTSNYYWHYENGKKVLVKQVKGDSWAIRKPMHKDTVFGEVNLRKVKSVSLNEALKNPQFIVEKDLKRQLLSLLQQNFDIKKIKKYFEEHKDIWSDISLSKMNIYYFTKETKDRYFATRKPLDASFDKKKIESCITDTGIQQILLRHLELKENDPERAFSPDGIDEMNRNIIQLNKGKGHHPIAKVRVYEKADKFEVGQRGNKSSKFVEAAKGTNLFFAVYETEYPDEKTNSIVRKRNYATIPLNIAIERQKRGLSTAPEDEKGNVPSFVLSPNDLVYLPTSEDIVNGHITQPIDKSRIYKMVSSSGSQCFFIKHNIANIIVDKYEFSPLNKMERAISNEMIKEICIPVKVDRLGNIVKLGKSE

SEQ ID NO: 823 - protein, 1509 aa, Bacteroides fluxus
MKTILGLDLGTNSVGWAVINSVIKEQAERIWIEMAGSRIIPMDAAVLGDFDKGNSISQTSERTRLRGVRRLRERQLLRRERLHKVLNILGFLPNHYLEYIDFEKHPGKFLSDAEPKLPWVKDEQGKYTFLFQAAFDEMLADFAIHQPSLVSGDKKIPYDWTIYYLRKKALTEMISKEELAWILLNFNQKRGYYQLRGEEEEDNAGKSVEFYALKVLTVEATDEKKGRDVWYNVHLENGWIYRRSSSVPLDWEGQIKEFIVTTDLNPDSTPKLDKYGEVKRSFRAPKEDDWMLIKKRTEADIANTHKTVGAYIYDTLLQKPQQKIIGKLVKTVERKLYRDELSLILQKQCAFHAELQDRTLYARCVEALYPNNEVQRRNIANRDFVYLLMDDVLFYQRPLKTKKSLIANCPYEENEYVDRETGEIKKAPLKCIAKSHPLFQEFRLWNFLSNIRIYQKEKEINGTLHLDVDVTAEFLKTEDDYVALFDWLNSRKEIEQKTFLKYPKFGLKKEISNYRWNYVEDKQYPCNETRHAILSRLEKANVCIDFLSNEKEVALWHILYSVSDKQEIEKALRTFAAKNGLDESFVEAFKKFPPFKSEYGAYSAKAIKKLLPLMRCGKYWDVSSIDDTTKERIKKIVAGEYDERIAVKVRDKVMNLSDISCFKRLPLWLACYIVYNRHSEDKEAVKWESPADIDAYLASFKQHSLRNPIVEQVITETLRVVRDIWKQVGRIDEIHIELGREMKNPADKRKRMTAQILENENANLRIKALLAEFMNPEYEIENVRPYSPSQQEILRIYEDMVLHAEDQLPEEIDAILKKFNSSKVPTKSEFLRYKLWLEQKYRSPYTGELIPLGKLFTAAYEIEHVIPQSRYFDDSFSNKVICESAVNKLKDNQLGYEFIKNHHGQKVEVGFGKSVEIFSVDSYERFVKEQYAKSAVKMKKMLMDDIPEQFIERQLNDSRYISKVIKGLLSNIVREKNDSGEYEPEAVSKNIVVCTGSVTDRLKRDWGMNDVWNSIVYPRFERLNSLTDTQSFGHWENKSGKKVFQTELPLEYQKGFSKKRIDHRHHAMDAIVIACATRNHVNYLSNESASRNAKISRYDLQRLLCDKSRTDDNGNYKWVIKKPWDTFTQDAREVLSKIVVSLKQNLRIINKTTNVYRHLDATGNRVYEKQKTGDSWAIRKPMHKDTVFGAVNLRKVKVVRLSVALDAPTMIVDKRVKNKVFELLSYKYDKKRIEKYFKENAVLWKELDLARVAVYYFTEATTEPLVAVRKPLDSTFNEKKIKESVTDTGIQKILLNHLCTKEGKPDLAFSAEGIEEMNRNLLQLNNGKRHQPIYKVRVYEPRGNKFSVGVLGNKGTKWVEAAKGTNLFFAIYITEDGKRTYETIPLNMVIEREKQGLAPVPDKNEKGDKLLFWLSPNDLVYLPTEEELEFGRINEPIDRGRIYKMVSSSGNQCFFIPQSISNAIIPTKELGANNKAERSWDGAMIKNICIPVKVDRLGRIIEVKYRINE

SEQ ID NO: 824 - protein, 1436 aa, Bacteroides fragilis; identical to SEQ ID NO: 155

SEQ ID NO: 825 - protein, 1512 aa, Bacteroides nordii
MKNILGLDLGTNSIGWAVINSEEDGPIVKKRIELAGSRIIPMDAAVLGNFDSGVTKSQTAERTSFRSIRRLRERQLLRRERLHKVLQILGFLPEHYVNDIDFENHPGKIKRNTEPKLPWRKNSMGQFEFIFQDSFEAMLTDFATHQPVFVSEGKKVPYDWTLYYLRKKALTEGISKEELAWLILNFNQKRGYYQLRGEEEEEQSNKLVEFYALRVVKVEATDDKKGKDTWYNVHLENGWIYRRTSNIPLDWEGKVKEFIVTTDLNEDGTPKLDKYGEVKRSFRAPKEDDWTLIKKKTESDIANSHKTVGCYIYDALLQNPHQKIKGRLVRTVERKFYKEELRLILEKQLSFHPELQDRDLYRACIDALYVSNEAHKNNISGRDFVYLFIDDIIFYQRPLKTKKSLIDNCPYEENQYMDRETGEVKQAPIKCIAKSHPLFQEFRLWQFISNIRIYQRERVLDDGKLETDVDVTPDFLKTEDDYTTLFEWFNDRKEVDQKAFLKNPQFGLKKTFTEYRWNYVEDKSYPCNETRNAILNGLQKAGVSADFLSREVEEALWHILYSVEDKIEIESALRKFASKHDLDDRFADVFKKLPPFKKEYGAYSAKAIKKLLPLMRIGKYWELSNIDDKTKERIDKIITGEWDENIHDRVREKAIKLSDITDFKGLPLWLSCYVVYNRHSEARAIAKWESPEDIDSYLRLFRQHSLRNPIVEQVITETLRTVRDIWKRVGQIDEIHVELGREIKNPADKRAKMTAQIVENENTNLRIKALLAEFINSEYEIENVRPYSSNQQEKLKIYEDTVLNGVKEIPEDINTILKKFRESDLKKRPTKSDFLHYKLWLEQKYCSPYTGRIIPLGKLFTSAYEIEHIIPQAHYFDDSFSNKVICEAEVNGLKDKKLGYEFIKHNPGKMVEIGFGKPPVRIFSVEEYERFVKENYSGIKNKMNKLLMDDIPETFIERQLNDSRYISKVVKSLLSNIVREKDSNGEYEPEAISKNVIVCTGSVTDRLKRDWGVNDVWNSIIYPRFERLNELTGSQQFGCWENKEGKRVFQTAVPLEMQKGFSKKRIDHRHHAMDAIVIACATRNHINYLSNESASKKAKISRTDLQRLLCTKCRTDDNGNYKWIVKKPWPAFTQDIRKALENITVSFKQNLRVINKTTNYYVHFDESGKKVLEKQINGDSWAIRKPMHKDTVFGKVNLQKVKEVRLSLALDTPKMIVDKKLKEKVLQLYSYKYDKKRIDKYFKENASLWKDLNLSKVAVYYFTNDSTEPLVAVRKPLDTSFNAKKIKESVTDTGIQKILLNHLSNNQDDPNLAFSPDGIDKMNKNLTALNDGKYHQPIYKVRVCEPQGNKFSVGTSGNKTSKYVEAAKGTNLFFAVYQTEDGKRSYETIPLNVVIEREKLGWTPVPENNNNGDKLLFWLSPNDLVYVPTADELNNGMRLDNMDKGRIYKMISCSGPQCFFIPQNVSNAIIPVIELGANNKAEKSWNNEMIKVVCVPIRVDRLGCITQINNQK

SEQ ID NO: 826 - protein, 779 aa, Bacteroides oleiciplenus
MKEGNQYDVACEYAGYRHSKSSLTREEIDNKVLKNRLEILPKNSLRNPVVEKILNQMVNVVNAVIDTYGKPDEIRVELARELKKGAKEREELAKSIAQNTREHEAIRQLLQTEFGMMHVTRNDIIRYKLYEELKDNGYKTLYSDQYIPREKVFSKEIDIEHIIPQARLFDDSLSNKTLEYRAVNIEKGNKTAYDFVKEKYGNDGLRRYLNHCEALFKDKKTKLKKLKMEDQDIPDGFIDRDLRNTQYIAKKALSMLSEISRRVVATTGSITDELRKDWQLVDIMKELNLPKYEALGFVETFKDKDGRIIKKIKDWSKRNDHRHHAMDALTVAFTKDVFIQYFNNKNAFWMSGSKEHANITAIKNKYFEKGKALAPIPLELFRTEAKHHLENILVSIKAKNKVVTNNINRTKKKNGENLKLQQTPRGQLHLESIYGSYRQCIIRDEKVNASFDASKIANVSKSAYRNALLKRLEAYDNDPKKAFTGKNSLDKNPVYLDENKMEKVPDRVKIVEFETVYTIRKPIDPKLSIDKVVDARIRTLLKKRLEEYGGDAQRAFSNIEENPIWLNKEKGISVKRVAIRGISNAQALHDKKDKDGNPILDKEGKGIPTDFVNTSNNHHVAIYRKPVVDKMGQVILDENGSPRYELGEDVISFFEAVARVNLRQPVVDKDYKRSEGWQFLFSMKQNEYFVFPNEKTGFNPKEIDLLNPENYALISPNLFRVQKIGLNDYTFRHHLETSIQNNSNELKFITWIRCGKNGINGVIKVRVNHIGQIVSMGEY

SEQ ID NO: 827 - protein, 653 aa, Bacteroides oleiciplenus
MKKILGLDLGSSSIGWALVNEGANDEEKSSIIKLGVRVNPLTVDEAQNFEKGKSITTNADRTLKRGMRRNLQRYKQRREALVEVLKKHEFITAGTLMSEQGNKTTFETYRLRAKAVEEEISLEEFARVLLMINKKRGYKSSRKAKGDEDGVLIDGMDVAKKLYDEDLNPGELCLQLLEAGKKTLPDFYRSDLQDEFDKIWNFQKQFNPESFCDTAKEEVRGKNRTQTWTILSKYFVWTEGDSVWNNEEARTEERIKEYKLVGIKRTTKGYEQKLENYRWRVQALSEQLNPEIIAIVLQEINGQISASSGYLGAISDRSKELFFNHQTVGQSLMSELDKNPNGSLRNKVFYRQDYLDEFNTIWEKQSLYHKELTVELKKEIRDIIIFYQRRLKSQKGLISTCEFEQREIIVEKDGKRKTKIIGCKVIPRSHPLFQEFKIWQTLNDVEVYVADRRTKRKQDRKSTTLFSDTEDILLVEGKRYLYQEEKELLAKELFVRENMKKAEVLKLLFEDPKELDLNFKQIDGNRTGFALFSAYSKMIEKYGYESVNFKNSADEIIEKLQIIFADLGWNTELFSIDLSKDDKELEKQPYFRLWHLLYSFEGDNTPTGNGKLIEALMRLCSVEKEYASVLANVSFQEDYGSLSAKAIKKYYLI

SEQ ID NO: 828 - protein, 1436 aa, Unknown
  Bacteroides sp. D2
MKRILGLDLGTNSIGWALVDEAENKDERSSIVKLGVRVNPLTVDELTNFEKGKSITTNADRTLKRGMRRNLQRYKLRRETLMEVLKEHKLITEDTILSENGNRTTFETYRLRAKAATEKISLEEFARVLLMINKKRGYKSCRKAKGAEEGTLIDGMDIARELYNNNLTPGELCLQLLDAGKKYLPDFYRSDLQNELDRIWEKQKEYYPEILTEVLKEELRGKKRDAVWAICAKSFVWEEYYTEWNKEKGKTEQQEREHKLEGIYSKRKRDEAKRENLQWRVNGLKEKLSLEQLVIVLQEMNIQINNSSGYLGAISDRSKELYFNKQTVGQYQMEMLDKNPNASLRNMVFYRQDYLDEFNTLWEKQAEYHKELTGELKKEIRDIVIFYQRRLKSQKGLVGFCEFESRQIEVEIDGKKKIKTVGNRVIPRSSPLFQEFKIWQILNNIEVTVVGKKGKRRKQKDNSPTLFDGLDDTEQLELNGSRYLYQEEKELLAQELFVRDKMTKSDVLKLLFDNPQELDLNFKTIDGNKTGYTLFQAYSKMIEMSGHEPVDFKKTVEKVVEHVKAVFDLLNWNTDILGFNSNEELDNQSYYKLWHLLYSFEGDNTPTGNARLVQKITELYGFEKEYAIILANVTFQDDYGSLSAKAIHKILPHLKEGNRYDVACAYAGYKHSESSLTKEEIANKALKDRLTLLPKNNLRNPVVEKILNQMVNVINAIIDTYGKPDEIRVELARELKKNAKEREELTKFIAETTRKHEEFKILLQSEFGLTNVSRTDILRYKLYKELESCGYKTLYSNTYIPREKLFSKEFDIEHIIPQARLFDDSFSNKTLEARSINLEKGNKTAYDFVKEKFGESGADNSLDHYLNNIEDLFKSGKISKTKYNKLKMAEQDIPDGFINRDLRNTQYIAKKALSMLNEISRRVVATSGTITDKLRQDWQLVDVMKELNWEKYKALGLVEYFEDKDGRQIGRIKDWTKRNDHRHHAMDALTVAFTKDIFIQYFNNKNASLNSNTNEYAIKNKYFQNGRAIAPIPLREFRVEAKKHLENTLISIKAKNKVVTGNINKTKKRGGVNKYLQQTPRGQLHLETIYGSGKQYLTKEEKVNASFDMKKIATVSKSAYRDVLLKRLHENDNDPKKAFTGKNSLDKQPIWLDKEQTRKVPEKVKTVTLETIYTVRKEISPDLKVDKVIDAGVRKILTGRLNEYGNDAKKAFSNLDENPIWLNKEKGISIKRVTISGISNAQSLHVKKDKDGKPILDEDSRNIPVDFVNTGNNHHVAVYRRPVIDKRGQLVIDEAGNPKYELEEVVVSFFEAVTRANLGQPIIDKDYKTSEGWQFLFSMKQNEYFVFPNEKTGFNPKEIDLLDAENYGVISPNLFRVQKFAHKNYVFRHHLETTIKDTSSILKGITWIDFRSSKGLDAIVKVRVNHIGQIVSVGEY

SEQ ID NO: 829 - protein, 1510 aa, Unknown
  Bacteroides sp. D2
MKRILGLDLGTNSIGWALVDSEEQRILGMGSRIIPMDQGVLDTFSGGNPVETQTAARTAYRGTRRLRERALLRRERLIRVLNMMKFLPEHYASQIDFEKRLGQFFDEKEPKLAWKQNDEGRFEFIFQQSFNEMIEEFKNKGVVREDKKIPYDWTIYYLRKKALSQEIEKEELAWILLNFNQKRGYYQLRGEEEEENPNKLVEYYSLKIVDVIADEKPNSKGDIWYSLHLENGWIYRRSSKIPLFGWKDKTRDFIVTTDLNDDGTVKKDKEGIEKRSFRAPSENDWVLLKKKTESDIEKSHKTVGAYVYETLLQNPMQKVRGKLVRTIERKFYKDELKQILEKQREFHPELRDEDLYNDCVRELYRSNETYQFILSKRDFVHLFLDDILFYQRPLRSQKSAIGDCILEFKTYKDKDGNNIKEYLKVISKSNPLYQEFRIWQWLYNLKIYRKEDDEDVTLQFIANIEDKEQLFDFLSNRKSIEQKPLLEYLIKAKGLKKQVKTEAYRWNYVEDKIYPCSETKTMISTRLAKVENIPDNFFTKEIEQKLWHIIYSVTDKNEFEKALRTFAKKYDLDIASFVDNFKKIPPFKNEYGSFSEKAIKKLLPLMRLGKYWKWNDIDNNTQNRISKIITGEYDEEIKDIVREKSIALTNENDFQGLQLWLAQYLVYGRHSEADIAGKWHSVADLEKYLNEFKQHSLRNPIVEQIITETLRVVRDIWRKYGQGAENFFSEIHVELGRDMKNTADERKKIVNVVTENENTNLRIKALLMELKNNSDGKLEVENVRPYSPTQQDILKIYEEYAISTGLDNEKDEKVKEDIKKISRVAQPTTTELQRYKLWLEQKYCSPYTGKVIPLGKLFTEEYQIEHIIPKSRYYDDSFSNKVICEAAVNKLKDKCLGLEFIKNYHGQIVETGFGQKVTIFDEEAYQNFVKQHYAYNRSKRTKLLLEEIPEKMIERQMNDTRYISKFVLPLLSNLVRAEENDNGVNSKNVLPVNGKITTMLKQDWGLNDVWNDLILPRFVRMNELAKTIAFTSWNEQHQKYLPTVPLELSKGFQKKRIDHRHHAMDALVIACATRDHVNLLNNKHANTDTIRYDLQRKLRLFERVTYIDPQTKNNVTKDIPKEFKKPWDNFTVDARNELEKIIVSFKQNLRIINKATNIYTKYENGKKIKVGQKGLNWAIRKPLHKETVFAKVSLRKRKTVRLSEALKDWKKIVDKKLKQEIKRLTCQYGKFDVDTILRYFKDRKYQFGEVDVSKVKMYYFDEENAAVRKNVDTSFTEKFIQGSVTDTGIQKILLNHLEAKGNKVEIAFSPEGIEEMNKNIIQLNEGKLHLPIFKVRVYETIGNKFSVGVKGNKKDKYVEAAKGTNLFFAIYVDENGIRSYETIPLNIVIERLKQGLSVVPEKNRKEHSLLFYLSPNDLVYVPIEDERENIHAVNLDQLNNEQRKRIYKMVSCTGSECHFVPYYVASPIVNKVEYSSLNKIGRSLTGEMIKDVCIKLKVDRLGNVKGISGL

SEQ ID NO: 830 - protein, 1436 aa, Unknown
  Bacteroides sp. 2_1_16
MKRILGLDLGTNSIGWALVNEAENKDERSSIVKLGVRVNPLTVDELTNFEKGKSITTNADRTLKRGMRRNLQRYKLRRETLTEVLKEHKLITEDTILSENGNRTTFETYRLRAKAVTEEISLEEFARVLLMINKKRGYKSSRKAKGVEEGTLIDGMDIARELYNNNLTPGELCLQLLDAGKKFLPDFYRSDLQNELDRIWEKQKEYYPEILTDVLKEELRGKKRDAVWAICAKYFVWKETYTEWNKEKGKTEQQEREHKLEGIYSKRKRDEAKRENLQWRVNGLKEKLSLEQLVIVFQEMNTQINNSSGYLGAISDRSKELYFNKQTVGQYQMEMLDKNPNASLRNMVFYRQDYLDEFNMLWEKQAVYHKELTEELKKEIRDIIIFYQRRLKSQKGLIGFCEFESRQIEVDIDGKKKIKTVGNRVISRSSPLFQEFKIWQILNNIEVTVVGKKRKRRKLKENYSAIFEELNDAEQLELNGSRRLCQEEKELLAQELFVRDKMTKSEVLKLLFDNPQELDLNFKTIDGNKTGYALFQAYSKMIEMSGHEPVDFKKPVEKVVEYIKAVFDLLNWNTDILGFNSNEELDNQSYYKLWHLLYSFEGDNTPTGNGRLIQKMTELYGFEKEYATILANVSFQDDYGSLSAKAIHKILPHLKEGNRYDVACVYAGYRHSESSLTREEIANKVLKDRLMLLPKNSLHNPVVEKILNQMVNVINVIIDIYGKPDEIRVELARELKKNAKEREELTKSIAQTTKANEEYKTLLQTEFGLTNVSRTDILRYKLYKELESCGYKTLYSNTYISREKLFSKEFDIEHIIPQARLFDDSFSNKTLEARSVNIEKGNKTAYDFVKEKFGESGADNSLEHYLNNIEDLFKSGKISKTKYNKLKMAEQDIPDGFIERDLRNTQYIAKKALSMLNEISHRVVATSGSVTDKLREDWQLIDVMKELNWEKYKALGLVEYFEDRDGRQIGRIKDWTKRNDHRHHAMDALTVAFTKDVFIQYFNNKNASLDPNANEHAIKNKYFQNGRAIAPMPLREFRAEAKKHLENTLISIKAKNKVITGNINKTRKKGGVNKNMQQTPRGQLHLETIYGSGKQYLTKEEKVNASFDMRKIETVSKSAYRDALLKRLYENDNDPKKAFAGKNSLDKQPIWLDKEQMRKVPEKVKIVTLEAIYTIRKEISPDLKVDKVIDVGVRKILIDRLNEYGNDAKKAFSNLDKNPIWLNKEKGISIKRVTISGISNAQSLHVKKDKDGKPILDENGRNIPVDFVNTGNNHHVAVYYRPVIDKRGQLVVDEAGNPKYELEEVVVSFFEAVTRANLGLPIIDKDYKTTEGWQFLFSMKQNEYFVFPNEKIGFNPKEIDLLDVENYGLISPNLFRVQKFSLKNYVFRHHLETTIKDTSSILRGITWIDFRSSKGLDTIVKVRVNHIGQIVSVGEY

SEQ ID NO: 831 - protein, 1424 aa, Unknown
  Bacteroides sp. 3_1_19
MKRILGLDLGTNSIGWALVNEAETDEEVSSIIRLGVRVNPLTVDETQNFEKGKSITTNAERTLKRSMRRNLQRYKLRRDALVEFLKELGFITDETILSEQGNRTTFETCRLRAKAAEEEISLEELSRVLLMINKKRGYKSSRKVKKEEDGVLIDGMEIAKKLYEEDLTPGQLCSQLLESGKKVLPDFYHSDLQEELDRIWSVQKQFHPDVFCDAAKEEIKGKNRSQTWAILANYFVWKEEVVGWNDREAKNETIEKECKLVGLKRTTKGYELKKENYRWRAQALTEQLGLEEIAVVLQEINGQINASSGYLGAISDRSKVLYFNHQTVGQYQMAELDKNPHASLRNMVFYRQDYLDEFDRIWEKQAEFHKELTAELKKEIRDMIIFYQRRLKSQKGLISFCEFERLEIVVEKDGKKQTKVIGCKVIPRSHPLFQEFKVWQTLNDIKVLGREKKRNALSASESRALYPEEKEILARELAIKENMKKADVLKLLFENPQELDLNFKQIDGNRTGFSLFSAYSKMIEKYGYEPLDFKKPADEIIGQLRTIFTDLGWNTNLFTIDLTKEGKELEMQPYFRLWHLLYSFEGDNTSTGNGKLIEKIMQLCGVEKEYAVELASLSFQDDYGSLSAKAIKRILPYLKEGNLYDVACEYAGYRHSKSSLTKEEIENKVLKGKLEVLPKNSLRNPVVEKILSQMVNVINTIIDTYGKPDEIRVELARELKKSAKEREELTKAIAKSTREHEEIRKLLQDEFGMMNVSRNDIIRYKLYEELKDNGYKTLYSNQYIPKEKIFSKEIDIEHIIPQSRLFDDSLSNKTLEYKAINIEKGNKTAYDFVKEKYGEEGLQQYINRCESLFNDKKAKLRKLKMEQKDIPDGFIDRDLRNTQYIAKKALAMLNEICRRVVATTGSITDQLREDWQLVDVMKELNLPKYEALGFVETYEDKDGRKIKRIKDWTKRNDHRHHAMDALTVAFTKDAFIQYFNNKNAAQDSGNRNHTNIIGIKTRYFDKGRALPPIPLEQFRIEAKQHLEKLLVSIKAKNKVVTVNVNRTKKRKGENTKIQQTPRGQLHLETVYGSHKQYVTKIEKVNASFDAAKIATVSKRAYRNALLKRLETFGNDPKKAFTGKNALEKNPLYADKYQTIRVPEKVQTVEFETIYTIRKPVDPALNVDKVVDVKVRAILERRLKEYGGDPKKAFVNFWENPIWLNKEKGISIKRVSIRGINNAQSIHVKKDKNGNPIWDENGKQIPVDFVNTGNNHHVAIYRKPVLDKKGQVTFDEDGNLMYELDEVVVPFFEAVTRANLGLPIIDKDYRKSEGWQFLFSMKQNEYFVFPNEKTGFNPKEVDLLNPDNYAMISPNLFRVQTMSKVMYGNNVVRDYKFRHHLETTVKDMKELKDIAYKQYKTLSFGNSVVKIRINHIGQIVSVGEY

SEQ ID NO: 832 - protein, 1055 aa, Unknown
  Bacteroides sp. 3_1_33FAA
MRIYRKDLAQDVDVTNELLKTEEDYVALFDWLNGKKEIDQKAFLKYPLFGLKKEVENYRWNYVQDKPYPCNETRSSMLARLEKCDISIEFLTKENEEALWHILYSVEDKNEIVKALQKFADKHDLNASFVDVFQKFPPFKKEYGSYSAKAIKKLLPLMRMGKYWSENSIDKGTRERMDKIITGEYDEKIENRVREKAIHLADVSDFKGLPLWLVCYIVYGRHSEAKEITQWKSPADIDLYLRSFKQHSLRNPIVEQIIIETLRVVRDIWKQVGNIDEIHVELGREMKNPADKRKKMTQQMSENENTNLRIKYLLTEFLNPEYEVENVRPYSPSQQDILRIYEEGVLNSVSDLPEEISDILKKFTETDLKKRPSRSEVLRYKLWLEQKYRSPYTGEVIPLGKLFTPAYEIEHVIPQSCYFDDSFSNKVICEAEVNKLKSNLLGHEFIVKHHGEIVELPFGKKVRIFTVDEYEQFVKDNYSRTRSKMKKLLMDDIPEEFVARQLNDSRYISKVVKSLLSNIVREKGEEEAISKNVIPCTGGVTDRLKKDWGINEVWNKIILPRFQRLNELTGTNKFTTKNVGIQEIPTMPLELQKGFNKKRIDHRHHAMDAIIIACANRNIINYLNNESATAKAELSRYDLQKMLCDKAKTDNNGNYKWVIRKPWASFTQDTYLALENIIVSFKQNLRVINKATNHFLHYNEEGKKIFVKQGKGDNWAIRKSMHKDTVFGEVNLRRIKTVALNEAMKNPQSIVVKDFKRKLLELWNLGFDAKRIKKYFEDNRETWSDINLSKIEVYYFSKDTKDRFFATRKPLDTSFDRKKIENNITDTGIQKILLRHLELKDNNPDIAFSPDGIDEMNRNIIQLNNGKYHQPIIKVRWYEQADKFAVGQTGNKSSKFVEAAKGTNLFFAVYESNILDKKTNTIIKKRNYATIPLNVAIERQKQGLPVAPEDENGNDPIFVLSPNDLVYLPTAADLANGIIAQPLDRGRIYKMVSCTGNEGYFIPARIANPILQTIELGSNNKAQKAWTDEMIKEICMPIKVDRLGNVLESSSSYKK

SEQ ID NO: 833 - protein, 1055 aa, Unknown
  Bacteroides sp. 9_1_42FAA
MRIYRKDLAQDVDVTNELLKTEEDYVALFDWLNGKKEIDQKAFLKYPVFGLKKEIENYRWNYVQDKPYPCNETRSLMLARLEKCDISIEFLTKENEEALWHILYSVEDKNEIVKALQKFADKHDLNASFVDVFQKFPPFKKEYGSYSAKAIKKLLPLMRMGKYWSENSIDKGTRERIDKIITGEYDEKIENRVREKAIHLADVSDFKGLPLWLVCYIVYGRHSEAKEIIQWKSPADIDSYLRSFKQHSLRNPIVEQIIIETLRVVRDIWKQVGNIDEIHVELGREMKNPADKRKKMTQQMSENENTNLRIKYLLTEFLNPEYEVENVRPYSPSQQDILRIYEEGVLNSVSDLPEEISDILKKFTETDLKKRPSRSEVLRYKLWLEQKYRSPYTGEVIPLGKLFTPAYEIEHVIPQSCYFDDSFSNKVICEAEVNKLKSNLLGHEFIVKHHGEIVELPFGKKVRIFTVDEYEQFVKDNYSRTRSKMKKLLMDDIPEEFVTRQLNDSRYISKVVKSLLSNIVREKGEEEAISKNVIPCTGGVTDRLKKDWGINEVWNKIILPRFQRLNELTGTNKFTTKNVGIQEIPTMPLELQKGFNKKRIDHRHHAMDAIIIACANRNIINYLNNESATAKAELSRYDLQKMLCDKAKTDNNGNYKWVIRKPWASFTQDTYLALENIIVSFKQNLRVINKATNRFLHYNEEGKKIFVKQGKGDNWAIRKSMHKDTVFGEVNLRRIKTVALNEAMKNPQSIVVKDFKRKLLELWNLGFDAKRIKKYFEDNRETWSDINLSKIEVYYFSKDTKDRFFATRKPLDTSFDRKKIENNITDTGIQKILLRHLELKDNNPDIAFSPDGIDEMNRNIIQLNNGKYHQPIIKIRWYEQADKFAVGQTGNKSSKFVEAAKGTNLFFAVYESNILDKKTNTIIKKRNYATIPLNVAIERQKQGLPVAPEDENGNDPIFVLSPNDLVYLPTDDELANGIIAQPLDRGRIYKMVSSSGEQCFFIKHIVANVLVDKFEFSPLNKMERALTGEMIKMICIPIKVDRLGNVLESSSSYKK

SEQ ID NO: 834 - protein, 286 aa, Bacteroides uniformis
MLSYKYDKKKIEKYFKENAFLWKELDIAKVAVYYFTENTTEPLVAVRKSLDSTFNEKKIASVTDTGIQKILLNHLKSKEGKAELAFSAEGIEEMNRNLLQLNDGKGHQPIYKVRVYEPRGNKFKVGVLGNKGAKWVEAAKGTNLFFAIYITEDGNRTYETIPLNWVIEREKQGLVPVPDRNEKGDKLLFWLSPNDLVYLPTEEERDFGRINEPIDRGRIYKMVSSSGNQCFFIPQSISNAIISTKELGSNNKAEKSWDGEMIKNICIPVKVDRLGRIIEVKYRVNE

SEQ ID NO: 835 - protein, 1508 aa, Bacteroides uniformis
MRTILGLDLGTNSIGWAVINSVIKEQTERIWIEMAGSRIIPMDAAILGDFDKGNSISQTAERTRFRGVRRLRERQLLRRERLHKVLKILGFLPEHYLKGIDFEKHTGKFLSGSEPKLPWVKDRWGKYSFLFQTAFNEMLADFAKHQPSLVFDGKKIPYDWTVYYLRKKALTEMISKEELAWILLNFNQKRGYYQLRGEEEEDNAGKSVEFYALKVLSVEATDEKKGRDIWYNVHLENGWVYRRSSNVPLDWEGRVKEFIVTTDLNPDGTPKLDKYGEVKRSFRAPKEDDWMLIKKRTEADITGTHKTIGSYIYDALLQEPQQKIIGKLVKTVERKFYKEELNFILQKQCAFHAELQDRDLYMRCIEALYPGNEVQRRNIANRDFIYLLIDDVLFYQRPLKTKKSLIANCPYEENEYVNRKTGEIKTAPLKCIAKSHPLFQEFRLWYFLSNIRVYQKEREVNGTLHLDVDVTTEFLKTEDDYVALFDWLNSRKEIDQKAFLRYPAFGLKKEINNYRWNYVEDKFYPCNETRHAILSRLEKAGIGIDFLSDEKETALWHILYSVSDKQEIEKALATFAVKNGLNESFVEVFKKFPPFKSEYGAYSAKAIKKLLPLMRCGKYWDMSLIDGTTKERIERIIAGECDESIGAKVREKAMNLSDISCFKRLPLWLACYVVYNRHSEDKEITKWETPADIDAYLAAFKQHSLRNPIVEQVITETLRVVRDIWKQVGKIDEIRIELGREMKNPADKRKRMTTQILENENANLRIKALLAEFVNPEYGVENVRPYSPSQQEILRIYEDAVLKGEEQIPEDIDVILKKFNTSKLPTKSEFLRYKLWLEQKYRSPYTGELIPLAKLFTAAYEIEHVIPQSRYFDDSFSNKVICESAVNKLKDNQLGYEFIKNHHGQKVEVGFGKTVEIFSVDSYERFVKEQYAKSGIKMKKLLMDDIPEQFIERQLNDSRYISKVVKGLLSNIVREKNDSGEYEPEAVSKNILVCTGSVTDRLKKDWGMNDVWNSIVSPRFERLNALTETQCFGHWENKDGKKVFQTAVPLEYQKGFSKKRIDHRHHAMDAIVIACATRNHVNYLNNESASRNAKISRYDLQRLLCDKSRGDGNGNYRWIIKKPWTTFTQDAREALSGIIVSLKQNLRIINKTTNIYQHFDANGTRVYEKQKIGDSWAIRKPMHKDTVFGAVNLRKVKVVRLSVALDTPSMIVNKRVKNKVLELLSYKYDKKKIEKYFKENAFLWKELDIAKVAVYYFTENTTEPLVAVRKSLDSTFNEKKIASVTDTGIQKILLNHLKSKEGKAELAFSAEGIEEMNRNLLQLNDGKGHQPIYKVRVYEPRGNKFKVGVLGNKGAKWVEAAKGTNLFFAIYITEDGNRTYETIPLNWVIEREKQGLVPVPDRNEKGDKLLFWLSPNDLVYLPTEEERDFGRINEPIDRGRIYKMVSSSGNQCFFIPQSISNAIISTKELGSNNKAEKSWDGEMIKNICIPVKVDRLGRIIEVKYRVNE

SEQ ID NO: 836 - protein, 1210 aa, Bacteroides uniformis
MRTILGLDLGTNSIGWAVINSVIKEQTERIWIEMAGSRIIPMDAAILGDFDKGNSISQTAERTRFRGVRRLRERQLLRRERLHKVLKILGFLPEHYLKGIDFEKHTGKFLSGSEPKLPWVKDRWGKYSFLFQTAFNEMLADFAKHQPSLVFDGKKIPYDWTVYYLRKKALTEMISKEELAWILLNFNQKRGYYQLRGEEEEDNAGKSVEFYALKVLSVEATDEKKGRDIWYNVHLENGWVYRRSSNVPLDWEGRVKEFIVTTDLNPDGTPKLDKYGEVKRSFRAPKEDDWMLIKKRTEADITGTHKTIGSYIYDALLQEPQQKIIGKLVKTVERKFYKEELNFILQKQCAFHAELQDRDLYMRCIEALYPGNEVQRRNIANRDFIYLLIDDVLFYQRPLKTKKSLIANCPYEENEYVNRKTGEIKTAPLKCIAKSHPLFQEFRLWYFLSNIRVYQKEREVNGTLHLDVDVTTEFLKTEDDYVALFDWLNSRKEIDQKAFLRYPAFGLKKEINNYRWNYVEDKFYPCNETRHAILSRLEKAGIGIDFLSDEKETALWHILYSVSDKQEIEKALATFAVKNGLNESFVEVFKKFPPFKSEYGAYSAKAIKKLLPLMRCGKYWDMSLIDGTTKERIERIIAGECDESIGAKVREKAMNLSDISCFKRLPLWLACYVVYNRHSEDKEITKWETPADIDAYLAAFKQHSLRNPIVEQVITETLRVVRDIWKQVGKIDEIRIELGREMKNPADKRKRMTTQILENENANLRIKALLAEFVNPEYGVENVRPYSPSQQEILRIYEDAVLKGEEQIPEDIDVILKKFNTSKLPTKSEFLRYKLWLEQKYRSPYTGELIPLAKLFTAAYEIEHVIPQSRYFDDSFSNKVICESAVNKLKDNQLGYEFIKNHHGQKVEVGFGKTVEIFSVDSYERFVKEQYAKSGIKMKKLLMDDIPEQFIERQLNDSRYISKVVKGLLSNIVREKNDSGEYEPEAVSKNILVCTGSVTDRLKKDWGMNDVWNSIVSPRFERLNALTETQCFGHWENKDGKKVFQTAVPLEYQKGFSKKRIDHRHHAMDAIVIACATRNHVNYLNNESASRNAKISRYDLQRLLCDKSRGDGNGNYRWIIKKPWTTFTQDAREALSGIIVSLKQNLRIINKTTNIYQHFDANGTRVYEKQKIGDSWAIRKPMHKDTVFGAVNLRKALIPQHYNLTLFISS

SEQ ID NO: 837 - protein, 1504 aa, Bacteroides vulgatus
MKNIVGLDLGTNSIGWAVVNGSVNDDGSEQLVKIQASGSRIIPMDAAMIGDFNKGNSISQTAERTRLRGVRRLSERYLLRRERLHRILDILGFLPFHFAQDLDRHGKIVKGKEPKLAWRKNEAGQFEFIFQDSFKEMLEDFKLNHPNLITDDKKVPYDWTIYYLRKKGLTSKISKEELAWILLNFNQKRGYYQLRGEEEEENKNKLVEFYALKVVAVEDSGEKKGKDIWYNVHLENGWVYRRTSNMPLDWVGKTKEFIVTTDLEKDGTPKKDKEGNVKRSFRAPKEDDWSLLKKKTEADIDQTHKTVGVYIYDTLLGNPSQKIRGRLVRTIERKYYKEELKQILEKQKEFHLELQDRALYAACIEELYPINEAHRNNVGNRDFTYLFLEDILFYQRPLKSKKSLIDNCPYEENQGLDKETGEIKSFPVKCIAKSHPLFQEFRLWQFIVNLRIYRKDLAQDVDVTNELLKTEEDYVALFDWLNGKKEIDQKAFLKYPVFGLKKEIENYRWNYVQDKPYPCNETRSLMLARLEKCDISIEFLTKENEEALWHILYSVEDKNEIVKALQKFADKHDLNASFVDVFQKFPPFKKEYGSYSAKAIKKLLPLMRMGKYWSENSIDKGTRERIDKIITGEYDEKIENRVREKAIHLADVSDFKGLPLWLVCYIVYGRHSEAKEITQWKSPADIDSYLRSFKQHSLRNPIVEQIIIETLRVVRDIWKQVGNIDEIHVELGREMKNPADKRKKMTQQMSENENTNLRIKYLLTEFLNPEYEVENVRPYSPSQQDILRIYEEGVLNSVSDLPEEISDILKKFTETDLKKRPSRSEILRYKLWLEQKYRSPYTGEVIPLGKLFTPAYEIEHVIPQSCYFDDSFSNKVICEAEVNKLKSNLLGHEFIVKHHGEIVELPFGKKVRIFTVDEYEQFVKDNYSRTRSKMKKLLMDDIPEEFVTRQLNDSRYISKVVKSLLSNIVREKGEEEAISKNVIPCTGGVTDRLKKDWGINEVWNKIILPRFQRLNELTGTNKFTTKNVGIQEIPTMPLELQKGFNKKRIDHRHHAMDAIIIACANRNIINYLNNESATAKAELSRYDLQKMLCDKAKTDNNGNYKWVIRKPWASFTQDTYLALENIIVSFKQNLRVINKATNRFLHYNEEGKKIFVKQGKGDNWAIRKSMHKDTVFGEVNLRRIKTVALNEAMKNPQSIVVKDFKRKLLELWNLGFDAKRIKKYFEDNRETWSDINLSKIEVYYFSKDTKDRFFATRKPLDTSFDRKKIENNITDTGIQKILLRHLELKDNNPDIAFSPDGIDEMNRNIIQLNNGKYHQPIIKIRWYEQADKFAVGQTGNKFSKFVEAAKGTNLFFAVYESNILDKKTNTIIKKRNYATIPLNVAIERQKQGLPVAPEDENGNDPIFVLSPNDLVYLPTDDELANGIIAQPLDRGRIYKMVSCTGNEGHFIPARIANPILQTIELGSNNKAQKAWTDEMIKEICMPIKVDRLGNVLESSSSYKK

SEQ ID NO: 838 - protein, 1153 aa, Barnesiella intestinihominis
MKNILGLDLGLSSIGWSVIRENSEEQELVAMGSRVVSLTAAELSSFTQGNGVSINSQRTQKRTQRKGYDRYQLRRTLLRNKLDTLGMLPDDSLSYLPKLQLWGLRAKAVTQRIELNELGRVLLHLNQKRGYKSIKSDFSGDKKITDYVKTVKTRYDELKEMRLTIGELFFRRLTENAFFRCKEQVYPRQAYVEEFDCIMNCQRKFYPDILTDETIRCIRDEIIYYQRPLKSCKYLVSRCEFEKRFYLNAAGKKTEAGPKVSPRTSPLFQVCRLWESINNIVVKDRRNEIVFISAEQRAALFDFLNTHEKLKGSDLLKLLGLSKTYGYRLGEQFKTGIQGNKTRVEIERALGNYPDKKRLLQFNLQEESSSMVNTETGEIIPMISLSFEQEPLYRLWHVLYSIDDREQLQSVLRQKFGIDDDEVLERLSAIDLVKAGFGNKSSKAIRRILPFLQLGMNYAEACEAAGYNHSNNYTKAENEARALLDRLPAIKKNELRQPVVEKILNQMVNVVNALMEKYGRFDEIRVELARELKQSKEERSNTYKSINKNQRENEQIAKRIVEYGVPTRSRIQKYKMWEESKHCCIYCGQPVDVGDFLRGFDVEVEHIIPKSLYFDDSFANKVCSCRSCNKEKNNRTAYDYMKSKGEKALSDYVERVNTMYTNNQISKTKWQNLLTPVDKISIDFIDRQLRESQYIARKAKEILTSICYNVTATSGSVTSFLRHVWGWDTVLHDLNFDRYKKVGLTEVIEVNHRGSVIRREQIKDWSKRFDHRHHAIDALTIACTKQAYIQRLNNLRAEEGPDFNKMSLERYIQSQPHFSVAQVREAVDRILVSFRAGKRAVTPGKRYIRKNRKRISVQSVLIPRGALSEESVYGVIHVWEKDEQGHVIQKQRAVMKYPITSINREMLDKEKVVDKRIHRILSGRLAQYNDNPKEAFAKPVYIDKECRIPIRTVRCFAKPAINTLVPLKKDDKGNPVAWVNPGNNHHVAIYRDEDGKYKERTVTFWEAVDRCRVGIPAIVTQPDTIWDNILQRNDISENVLESLPDVKWQFVLSLQQNEMFILGMNEEDYRYAMDQQDYALLNKYLYRVQKLSKSDYSFRYHTETSVEDKYDGKPNLKLSMQMGKLKRVSIKSLLGLNPHKVHISVLGEIKEIS

SEQ ID NO: 839 - protein, 1352 aa, Belliella baltica
MKKILGLDLGTTSIGWAFIKEPEKDVVGSEIVDMGVRIVPLSSDEENDFAKGNTISINADRTLKRGARRNLQRFKQRRNALLEIFKEKKLISTNFKYAEDGPSSTFSTLNLRAKAAKEKIELQDLVKVLLQINKKRGYKSSRKAKSEEDDGSAIDSMGIAKELYENDLTPGQWVYEALQKGRKNVPDFYRSDLQEEFKKIVNYQSEFFPDIFNASFVEDWMGKASTPTKQYFNKKGVQLAENKGKREERRLQEYKWRAEAVNFKIDLSEIALILSQINSQISNSSGYLGAISDRSKELYFKNLTVGQYLYQQIKKNPHTRLKGQVFYRQDYLDEFERIWSVQSSFYPQLNDALKREVRDITIFFQRRLKSQKHLISNCEFEDHHKVVPKSHPVFQEFRIWQNLNNLLLIKKDNLNEKFDLELESKIALANELAFKRELNVKDALKILGLKPNEWEFNFTKIEGNRTNQAFFDAFAKIIELEDGEPIDLGDLKADDILDQFSEAFLRIGIDTELLQVNSDIEGAEYEKQSYIQFWHLLYSSEDDQKLKLNLIRKFGFKPEHAKILASISLQDDHASLSSRAIKKILPHLQSGLIYDKACTYAGYNHSSSFTKDENEKRELRAELELLKKNSLRNPVVEKILNQMINVVNAILKDPELGRPDEIRVEMARELKANAEQRKNMTSNIASATRDHDKYREILKSEFGLKRVTKNDLLRYKLWLETDGISLYTGKPIEASKLFSKEYDIEHIIPKARLFDDSFSNKTICERQLNIDKANVTAFSFLQNKLSADEFEQYQSRVKSLYGKLSKAKIQKLLMANDKIPEDFIARQLQETRYISKKAKEILFEISRRVSVTTGTITDKLREDWGLVEIMKELNWEKYDKLGLTYTIEGKHGERLNKIKDWSKRNDHRHHAMDALTVALTKPAYIQYLNNLNAKGLNNKKGTEVFAIEQKYLKRENGKLCFIPPIENIRSEAKKHLSRILVSYKAKNKVVTINKNKTKSKAGLNEQIALTPRGQLHKETVYGKSFHYSTKFEKIGASFNVQKINTVAKKEEREALLKRLAENGNDPKKAFTGKNTLNKMPIYLDLGKNIKLSEKVKTVVLEQNYTIRKNIDPDLKVDKVIDVGIKRILESRLEEFGGNAKLAFSNLEENPIWLNKEKGISIKRVKISGVSNVESLHVKKDHFGEPILDQEGNEIPVDFVSTGNNHHVAIYEDENGNLQEEVVSFFEAVVRQNQGLPIIKKNHTLGWKFLFTLKQNEYFVFPSDDFVPADVDLMDEQNYHLISPNLFRVQKIARKNYVFNNHLETKAVDNDLLKSKKELSKITYHFYQTPEHLRGIIKIRINHLGKIIQIGEY

SEQ ID NO: 840 - protein, 1415 aa, Bergeyella zoohelcum
MKHILGLDLGTNSIGWALIERNIEEKYGKIIGMGSRIVPMGAELSKFEQGQAQTKNADRRTNRGARRLNKRYKQRRNKLIYILQKLDMLPSQIKLKEDFSDPNKIDKITILPISKKQEQLTAFDLVSLRVKALTEKVGLEDLGKIIYKYNQLRGYAGGSLEPEKEDIFDEEQSKDKKNKSFIAFSKIVFLGEPQEEIFKNKKLNRRAIIVETEEGNFEGSTFLENIKVGDSLELLINISASKSGDTITIKLPNKTNWRKKMENIENQLKEKSKEMGREFYISEFLLELLKENRWAKIRNNTILRARYESEFEAIWNEQVKHYPFLENLDKKTLIEIVSFIFPGEKESQKKYRELGLEKGLKYIIKNQVVFYQRELKDQSHLISDCRYEPNEKAIAKSHPVFQEYKVWEQINKLIVNTKIEAGTNRKGEKKYKYIDRPIPTALKEWIFEELQNKKEITFSAIFKKLKAEFDLREGIDFLNGMSPKDKLKGNETKLQLQKSLGELWDVLGLDSINRQIELWNILYNEKGNEYDLTSDRTSKVLEFINKYGNNIVDDNAEETAIRISKIKFARAYSSLSLKAVERILPLVRAGKYFNNDFSQQLQSKILKLLNENVEDPFAKAAQTYLDNNQSVLSEGGVGNSIATILVYDKHTAKEYSHDELYKSYKEINLLKQGDLRNPLVEQIINEALVLIRDIWKNYGIKPNEIRVELARDLKNSAKERATIHKRNKDNQTINNKIKETLVKNKKELSLANIEKVKLWEAQRHLSPYTGQPIPLSDLFDKEKYDVDHIIPISRYFDDSFTNKVISEKSVNQEKANRTAMEYFEVGSLKYSIFTKEQFIAHVNEYFSGVKRKNLLATSIPEDPVQRQIKDTQYIAIRVKEELNKIVGNENVKTTTGSITDYLRNHWGLTDKFKLLLKERYEALLESEKFLEAEYDNYKKDFDSRKKEYEEKEVLFEEQELTREEFIKEYKENYIRYKKNKLIIKGWSKRIDHRHHAIDALIVACTEPAHIKRLNDLNKVLQDWLVEHKSEFMPNFEGSNSELLEEILSLPENERTEIFTQIEKFRAIEMPWKGFPEQVEQKLKEIIISHKPKDKLLLQYNKAGDRQIKLRGQLHEGTLYGISQGKEAYRIPLTKFGGSKFATEKNIQKIVSPFLSGFIANHLKEYNNKKEEAFSAEGIMDLNNKLAQYRNEKGELKPHTPISTVKIYYKDPSKNKKKKDEEDLSLQKLDREKAFNEKLYVKTGDNYLFAVLEGEIKTKKTSQIKRLYDIISFFDATNFLKEEFRNAPDKKTFDKDLLFRQYFEERNKAKLLFTLKQGDFVYLPNENEEVILDKESPLYNQYWGDLKERGKNIYVVQKFSKKQIYFIKHTIADIIKKDVEFGSQNCYETVEGRSIKENCFKLEIDRLGNIVKVIKR

SEQ ID NO: 841 - protein, 1430 aa, Bergeyella zoohelcum
MKHILGLDLGTNSIGWAVVKEAQNDNEQSEIVDVGVRVNPLTTDEKTNFEKGKPISTNADRTLKRSARRNLQRYKLRRKELIELLKEHQLISTDTILTENGKGTTFQTLELRAKSAKEKISLEELARVFLTINKKRGYKSSRKAKNEDEGQLIDGMEIAKRLYEENLTTGQLSLQLLKEGKKSLPDYYRSDLQFELDKVWNFQKQFHSDILTDEFYAQLKGKGQRATSALFLAKYQIYTAENKGSREDKKLQAYQWRVDALSKELTREQLAFVITEINNNLNNSSGYLGAISDRSKELYFNNETVGEYLWKQIAANPHTSLKNQVFYRQDYLDEFEQIWKTQSAFYPEILTDELKKELRDVVIFYQRKLKSQKSLVSFCEFENKEIEIKKEDGTSTKKVIGLKVAPKSSPLFQEFKIWQNLNNVLIRKKGSKTKKVAKNQQAVLFEEEKTISELDLEAKQALFNELNLKGNLKADYCLEILGYSPKEWEMNYSVLEGNRTNKALYEAYLKITDLEGYDAKNHLKVKLNKDEVELDDLKVPASEIKDMVQAIFKEAGINTDILHFNAELDGKDFENQASYQLWHLLYSYEGDDSKSGNELLYKLLETKFGFKKEYAQILANVSLSDDYGSLSTKAMRKIHPYIKENKFSTACELAGYRHSKHSLTKEENDNRVLKDSLEVLKKNSLRQPVVEKILNQMINLVNALLKKYRTENPNFKFDEIRIELARELKKNAEERANMTANINKAKTEHEKIIKILKNEFGLPNPTRNDIIRYRLYEELKANGYKDLYTNIKIPQEKLFTKEIDIEHIIPKSRVFDDSFSNKTLSFRKTNLDKGERTAFDYMESKFGADKLEEYVARVEDLYKNNIISKAKYQKLLKKESEIGDGFVERDLRETQYIAKKAKEILLQITPNVLSTSGGITDRLREDWDLINVMKELNLPKYRALGLTQMEDRKYGQQVEVITDWTKRNDHRHHAMDALTVAFTKHNHIQYLNYLNARKNEKHKEHSNIMGIQQLETIKVTDKNGNEKRVFKAPMPNFRQVTKAFLENILISHKAKNKVVTKNKNKVAGSNKVQEVLTPRGQLHKETVYGKYQYYVQKEEKIGAKFDLETIKKVANPLYQSLLKKRLEENGGDPKKAFTGKNSLAKNPIYLDDTQTEQLPEKVKLVWLENSFSIRKDITPENFKDEKLIDKILDEGVKRILKERLQSFGNDAKKAFSDLDKNPIWLNKEKGITIKRVTISGVANAEPLHTKKDHLGKEILDKEGKPIPVDFISTGSNHHVAVYRDEKGNLQEKVVSVFEAVVRANQGLPIIDKTYNQHLGWEFLFTMKQNEMFVFPNESTGFNPNDIDLLDPKNKRIISPNLFRVQKFSKLQYGNSFVREFVFRHHLETTVEDRKELQGITYKQMKNSTFFNDIIKVRINHLGDIVSIGEY

SEQ ID NO: 842 - protein, 1281 aa, Bifidobacterium bifidum
MEDDSQHDIREIYLAIHHMVKYRGNFLVEGTLESSNAFKEDELLKLLGRITRYEMSEGEQNSDIEQDDENKLVAPANGQLADALCATRGSRSMRVDNALEALSAVNDLSREQRAIVKAIFAGLEGNKLDLAKIFVSKEFSSENKKILGIYFNKSDYEEKCVQIVDSGLLDDEEREFLDRMQGQYNAIALKQLLGRSTSVSDSKCASYDAHRANWNLIKLQLRTKENEKDINENYGILVGWKIDSGQRKSVRGESAYENMRKKANVFFKKMIETSDLSETDKNRLIHDIEEDKLFPIQRDSDNGVIPHQLHQNELKQIIKKQGKYYPFLLDAFEKDGKQINKIEGLLAFRVPYFVGPLVVPEDLQKSDNSENHWMVRKKKGEITPWNFDEMVDKDASGRKFIERLVGTDSYLLGEPTLPKNSLLYQEYEVLNELNNVRLSVRTGNHWNDKRRMRLGREEKTLLCQRLFMKGQTVTKRTAENLLRKEYGRTYELSGLSDESKFTSSLSTYGKMCRIFGEKYVNEHRDLMEKIVELQTVFEDKETLLHQLRQLEGISEADCALLVNTHYTGWGRLSRKLLTTKAGECKISDDFAPRKHSIIEIMRAEDRNLMEIITDKQLGFSDWIEQENLGAENGSSLMEVVDDLRVSPKVKRGIIQSIRLIDDISKAVGKRPSRIFLELADDIQPSGRTISRKSRLQDLYRNANLGKEFKGIADELNACSDKDLQDDRLFLYYTQLGKDMYTGEELDLDRLSSAYDIDHIIPQAVTQNDSIDNRVLVARAENARKTDSFTYMPQIADRMRNFWQILLDNGLISRVKFERLTRQNEFSEREKERFVQRSLVETRQIMKNVATLMRQRYGNSAAVIGLNAELTKEMHRYLGFSHKNRDINDYHHAQDALCVGIAGQFAANRGFFADGEVSDGAQNSYNQYLRDYLRGYREKLSAEDRKQGRAFGFIVGSMRSQDEQKRVNPRTGEVVWSEEDKDYLRKVMNYRKMLVTQKVGDDFGALYDETRYAATDPKGIKGIPFDGAKQDTSLYGGFSSAKPAYAVLIESKGKTRLVNVTMQEYSLLGDRPSDDELRKVLAKKKSEYAKANILLRHVPKMQLIRYGGGLMVIKSAGELNNAQQLWLPYEEYCYFDDLSQGKGSLEKDDLKKLLDSILGSVQCLYPWHRFTEEELADLHVAFDKLPEDEKKNVITGIVSALHADAKTANLSIVGMTGSWRRMNNKSGYTFSDEDEFIFQSPSGLFEKRVTVGELKRKAKKEVNSKYRTNEKRLPTLSGASQP

SEQ ID NO: 843 - protein, 1121 aa, Bifidobacterium dentium
MSVGLAAIEVDETGFPIRILNIQSVIHDGGIDPQLGKKKSISRKAISGVARRTRRMRRRKVVRLRQLDATLESLGFPIVEPDSLDTWEIWLTRAKLASSYIQDDETRKEDVSIALRHIARHRGWRNPYSNVESLFVDVAPSEQYEELRRKAEEKLGTSLSGNPTSAEIVECILKRQVGEVQLRTRSRKGVNGNAVEKEGLLPTKLMQSDNAAEIRRIFKVQRIDDETGRKLLRAVFKACSPKGSVERRVGRDALAPGLPRALKASLAFQEYRIANVLTNLVISEDGTKRKLTIAEKQRVFGFLSSNETDDITWIDVAEKLGLERRQIQGVGCLTADGEERISSTPPRNITALHIHSAKPVIREKLVAWWKAASPTVRETMVELLSNTVDIDRVREDMDYSSAVAFIDSLGDEELTALDSVDLLSGRAAYSRQTLKQLTERMLNTDDDLHEARKAVFGVDDNWKPPVDAISTSVGNPAVDRVLKIVNRYLLACQKRWRNPQSVQIEHVRESFSSVAKAKETERVQGERARYRNDLRRELCEQEGLNKIRESDIRRWESVQRQNGTCLYCGSPITFRTCEMDHIVPRKGVGSTNTRVNLAAACAACNKLKSNTAFSVWARTEGAANRKVSQRDAIERVKTFIFNKSVPPREQRAFKQAVISRLRQAESDPAIDNRSIESVAWMADELHRRIEAYFNQDADVSGNTPATQVWVFQGRVTALARKASGIEGRIHFAGEWKKTRLDRRHHAVDAAVIAMMNHSAAQTLVERDSLRLSQWITRKPETWKNYPFSEGQKKTRFKEWLDCMNALLDLLNDALDSDRVPVTRCQRMSLGNSQAHAATIRKMKRVELFSPMDADLIRRASTPALYCALTRLPEYSPEKGLPENRGREIVLNGRHIRSTETVDFFASGAAQLMVRNGSAEIGDSIHHMRIYRYRKTGAKSQEYVYGMIRVFQIDLLHASSENLFAVQLPSQSVSVRYGDKNVVQAIQEGRAEYLGHIVPNDEILISYEGVRMKDSEKIGAYANDFSGTASELAQRRHWVVVGSDVSKLALRPSYLSEEGLENSGSESERLSKQTRKVIEGKGWVVAVNILAKYHPVVIRRNALGEPRFRTNSGMPVSWRWDR

SEQ ID NO: 844 - protein, 354 aa, Bifidobacterium longum
AKQYVNSASIDDAEAETMKTTVSVFQGRVTASARRAAGIEGKIHFIGQQSKTRLDRRHHAVDASVIAMMNTAAAQTLMERESLRESQRLIGLMPGERSWKEYPYEGTSRYESFHLWLDNMDVLLELLNDALDNDRIAVMQSQRYVLGNSIAHDATIHPLEKVPLGSAMSADLIRRASTPALWCALTRLPDYDEKEGLPEDSHREIRVHDTRYSADDEMGFFASQAAQIAVQEGSADIGSAIHHARVYRCWKTNAKGVRKYFYGMIRVFQTDLLRACHDDLFTVPLPPQSISMRYGEPRVVQALQSGNAQYLGSLVVGDEIEMDFSSLDVDGQIGEYLQFFSQFSGGNLAWKHWV

SEQ ID NO: 845 - protein, 1124 aa, Bifidobacterium longum
LTGHSGHTFWPTSSSPPIQLEQEKRPLPQRNTSQNGHTFWPITRERCFMRGKRYRIGIDVGLNSVGLAAVEVSDENSPVRLLNAQSVIHDGGVDPQKNKEAITRKNMSGVARRTRRMRRRKRERLHKLDMLLGKFGYPVIEPESLDKPFEEWHVRAELATRYIEDDELRRESISIALRHMARHRGWRNPYRQVDSLISDNPYSKQYGELKEKAKAYNDDATAAEEESTPAQLVVAMLDAGYAEAPRLRWRTGSKKPDAEGYLPVRLMQEDNANELKQIFRVQRVPADEWKPLFRSVFYAVSPKGSAEQRVGQDPLAPEQARALKASLAFQEYRIANVITNLRIKDASAELRKLTVDEKQSIYDQLVSPSSEDITWSDLCDFLGFKRSQLKGVGSLTEDGEERISSRPPRLTSVQRIYESDNKIRKPLVAWWKSASDNEHEAMIRLLSNTVDIDKVREDVAYASAIEFIDGLDDDALTKLDSVDLPSGRAAYSVETLQKLTRQMLTTDDDLHEARKTLFNVTDSWRPPADPIGEPLGNPSVDRVLKNVNRYLMNCQQRWGNPVSVNIEHVRSSFSSVAFARKDKREYEKNNEKRSIFRSSLSEQLRADEQMEKVRESDLRRLEAIQRQNGQCLYCGRTITFRTCEMDHIVPRKGVGSTNTRTNFAAVCAECNRMKSNTPFAIWARSEDAQTRGVSLAEAKKRVTMFTFNPKSYAPREVKAFKQAVIARLQQTEDDAAIDNRSIESVAWMADELHRRIDWYFNAKQYVNSASIDDAEAETMKTTVSVFQGRVTASARRAAGIEGKIHFIGQQSKTRLDRRHHAVDASVIAMMNTAAAQTLMERESLRESQRLIGLMPGERSWKEYPYEGTSRYESFHLWLDNMDVLLELLNDALDNDRIAVMQSQRYVLGNSIAHDATIHPLEKVPLGSAMSADLIRRASTPALWCALTRLPDYDEKEGLPEDSHREIRVHDTRYSADDEMGFFASQAAQIAVQEGSADIGSAIHHARVYRCWKTNAKGVRKYFYGMIRVFQTDLLRACHDDLFTVPLPPQSISMRYGEPRVVQALQSGNAQYLGSLVVGDEIEMDFPVSMLMVRLASIYNSSRSLVEGTLHGNIGLLMDSLTRRS

SEQ ID NO: 846 - protein, 166 aa, Bifidobacterium longum
MGLAAVEVSDENSPVRLLNAQSVIHDGGVDPQKNKEAITRKNMSGVARRTRRMRRRKRERLHKLDMLLGKFGYPVIEPESLDKPFEEWHVRAELATRYIEDDELRRESISIALRHMARHRGWRNPYRQVDSLISDNPYSKQYGELKEKAKAYNDDATAAEEESTPA

SEQ ID NO: 847 - protein, 1138 aa, Bifidobacterium longum
MNSVGLAAVEVSDENSPVRLLNAQSVIHDGGVDPQKNKEAITRKNMSGVARRTRRMRRRKRERLHKLDMLLGKFGYPVIEPESLDKPFEEWHVRAELATRYIEDDELRRESISIALRHMARHRGWRNPYRQVDSLISDNPYSKQYGELKEKAKAYNDDATAAEEESTPAQLVVAMLDAGYAEAPRLRWRTGSKKPDAEGYLPVRLMQEDNANELKQIFRVQRVPADEWKPLFRSVFYAVSPKGSAEQRVGQDPLAPEQARALKASLAFQEYRIANVITNLRIKDASAELRKLTVDEKQSIYDQLVSPSSEDITWSDLCDFLGFKRSQLKGVGSLTEDGEERISSRPPRLTSVQRIYESDNKIRKPLVAWWKSASDNEHEAMIRLLSNTVDIDKVREDVAYASAIEFIDGLDDDALTKLDSVDLPSGRAAYSVETLQKLTRQMLTTDDDLHEARKTLFNVTDSWRPPADPIGEPLGNPSVDRVLKNVNRYLMNCQQRWGNPVSVNIEHVRSSFSSVAFARKDKREYEKNNEKRSIFRSSLSEQLRADEQMEKVRESDLRRLEAIQRQNGQCLYCGRTITFRTCEMDHIVPRKGVGSTNTRTNFAAVCAECNRMKSNTPFAIWARSEDAQTRGVSLAEAKKRVTMFTFNPKSYAPREVKAFKQAVIARLQQTEDDAAIDNRSIESVAWMADELHRRIDWYFNAKQYVNSASIDDAEAETMKTTVSVFQGRVTASARRAAGIEGKIHFIGQQSKTRLDRRHHAVDASVIAMMNTAAAQTLMERESLRESQRLIGLMPGERSWKEYPYEGTSRYESFHLWLDNMDVLLELLNDALDNDRIAVMQSQRYVLGNSIAHDATIHPLEKVPLGSAMSADLIRRASTPALWCALTRLPDYDEKEGLPEDSHREIRVHDTRYSADDEMGFFASQAAQIAVQEGSADIGSAIHHARVYRCWKTNAKGVRKYFYGMIRVFQTDLLRACHDDLFTVPLPPQSISMRYGEPRVVQALQSGNAQYLGSLVVGDEIEMDFSSLDVDGQIGEYLQFFSQFSGGNLAWKHWVVDGFFNQTQLRIRPRYLAAEGLAKAFSDDVVPDGVQKIVTKQGWLPPVNTASKTAVRIVRRNAFGEPRLSSAHHMPCSWQWRHE

SEQ ID NO: 848 - protein, 182 aa, Bifidobacterium longum
MRGKRYRIGIDVGLNSVGLAAVEVSDENSPVRLLNAQSVIHDGGVDPQKNKEAITRKNMSGVARRTRRMRRRKRERLHKLDMLLGKFGYPVIEPESLDKPFEEWHVRAELATRYIEDDELRRESISIALRHMARHRGWRNPYRQVDSLISDNPYSKQYGELKEKAKAYNDDATAAEEESTPA

SEQ ID NO: 849 - protein, 441 aa, Bifidobacterium longum
MVAMLDAGYAEAPRLRWRTGSKKPDAEGYLPVRLMQEDNANELKQIFRVQRVPADEWKPLFRSVFYAVSPKGSAEQRVGQDPLAPEQARALKASLAFQEYRIANVITNLRIKDASAELRKLTVDEKQSIYDQLVSPSSEDITWSDLCDFLGFKRSQLKGVGSLTEDGEERISSRPPRLTSVQRIYESDNKIRKPLVAWWKSASDNEHEAMIRLLSNTVDIDKVREDVAYASAIEFIDGLDDDALTKLDSVDLPSGRAAYSVETLQKLTRQMLTTDDDLHEARKTLFNVTDSWRPPADPIGEPLGNPSVDRVLKNVNRYLMNCQQRWGNPVSVNIEHVRSSFSSVAFARKDKREYEKNNEKRSIFRSSLSEQLRADEQMEKVRESDLRRLEAIQRQNGQCLYCGRTITFRTCEMDHIVPRKGVGSTNTRTNFAAVCAECNRM

SEQ ID NO: 850 - protein, 967 aa, Bifidobacterium longum
MVAMLDAGYAEAPRLRWRTGSKKPDAEGYLPVRLMQEDNANELKQIFRVQRVPADEWKPLFRSVFYAVSPKGSAEQRVGQDPLAPEQARALKASLAFQEYRIANVITNLRIKDASAELRKLTVDEKQSIYDQLVSPSSEDITWSDLCDFLGFKRSQLKGVGSLTEDGEERISSRPPRLTSVQRIYESDNKIRKPLVAWWKSASDNEHEAMIRLLSNTVDIDKVREDVAYASAIEFIDGLDDDALTKLDSVDLPSGRAAYSVETLQKLTRQMLTTDDDLHEARKTLFNVTDSWRPPADPIGEPLGNPSVDRVLKNVNRYLMNCQQRWGNPVSVNIEHVRSSFSSVAFARKDKREYEKNNEKRSIFRSSLSEQLRADEQMEKVRESDLRRLEAIQRQNGQCLYCGRTITFRTCEMDHIVPRKGVGSTNTRTNFAAVCAECNRMKSNTPFAIWARSEDAQTRGVSLAEAKKRVTMFTFNPKSYAPREVKAFKQAVIARLQQTEDDAAIDNRSIESVAWMADELHRRIDWYFNAKQYVNSASIDDAEAETMKTTVSVFQGRVTASARRAAGIEGKIHFIGQQSKTRLDRRHHAVDASVIAMMNTAAAQTLMERESLRESQRLIGLMPGERSWKEYPYEGTSRYESFHLWLDNMDVLLELLNDALDNDRIAVMQSQRYVLGNSIAHDATIHPLEKVPLGSAMSADLIRRASTPALWCALTRLPDYDEKEGLPEDSHREIRVHDTRYSADDEMGFFASQAAQIAVQEGSADIGSAIHHARVYRCWKTNAKGVRKYFYGMIRVFQTDLLRACHDDLFTVPLPPQSISMRYGEPRVVQALQSGNAQYLGSLVVGDEIEMDFSSLDVDGQIGEYLQFFSQFSGGNLAWKHWVVDGFFNQTQLRIRPRYLAAEGLAKAFSDDVVPDGVQKIVTKQGWLPPVNTASKTAVRIVRRNAFGEPRLSSAHHMPCSWQWRHE

SEQ ID NO: 851 - protein, 1151 aa, Unknown
  Bifidobacterium sp. 12_1_47BFAA
MRGKRYRIGIDVGLNSVGLAAVEVSDENSPVRLLNAQSVIHDGGVDPQKNKEAITRKNMSGVARRTRRMRRRKRERLHKLDMLLGKFGYPVIEPESLDKPFEEWHVRAELATRYIEDDELRRESISIALRHMARHRGWRNPYRQVDSLISDNPYSKQYGELKEKAKAYNDDATAAEEESTPAQLVVAMLDAGYAEAPRLRWRTGSKKPDAEGYLPVRLMQEDNANELKQIFRVQRVPADEWKPLFRSVFYAVSPKGSAEQRVGQDPLAPEQARALKASLAFQEYRIANVITNLRIKDASAELRKLTVDEKQSIYDQLVSPSSEDITWSDLCDFLGFKRSQLKGVGSLTEDGEERISSRPPRLTSVQRIYESDNKIRKPLVAWWKSASDNEHEAMIRLLSNTVDIDKVREDVAYASAIEFIDGLDDDALTKLDSVDLPSGRAAYSVETLQKLTRQMLTTDDDLHEARKTLFNVTDSWRPPADPIGEPLGNPSVDRVLKNVNRYLMNCQQRWGNPVSVNIEHVRSSFSSVAFARKDKREYEKNNEKRSIFRSSLSEQLRADEQMEKVRESDLRRLEAIQRQNGQCLYCGRTITFRTCEMDHIVPRKGVGSTNTRTNFAAVCAECNRMKSNTPFAIWARSEDAQTRGVSLAEAKKRVTMFTFNPKSYAPREVKAFKQAVIARLQQTEDDAAIDNRSIESVAWMADELHRRIDWYFNAKQYVNSASIDDAEAETMKTTVSVFQGRVTASARRAAGIEGKIHFIGQQSKTRLDRRHHAVDASVIAMMNTAAAQTLMERESLRESQRLIGLMPGERSWKEYPYEGTSRYESFHLWLDNMDVLLELLNDALDNDRIAVMQSQRYVLGNSIAHDATIHPLEKVPLGSAMSADLIRRASTPALWCALTRLPDYDEKEGLPEDSHREIRVHDTRYSADDEMGFFASQAAQIAVQEGSADIGSAIHHARVYRCWKTNAKGVRKYFYGMIRVFQTDLLRACHDDLFTVPLPPQSISMRYGEPRVVQALQSGNAQYLGSLVVGDEIEMDFSSLDVDGQIGEYLQFFSQFSGGNLAWKHWVVDGFFNQTQLRIRPRYLAAEGLAKAFSDDVVPDGVQKIVTKQGWLPPVNTASKTAVRIVRRNAFGEPRLSSAHHMPCSWQWRHE

SEQ ID NO: 852 - protein, 1092 aa, Brevibacillus laterosporus
MAYTMGIDVGIASCGWAIVDLERQRIIDIGVRTFEKAENPKNGEALAVPRREARSSRRRLRRKKHRIERLKYMFVRNGLAVDIQHLEQTLRSQNEIDVWQLRVDGLDRMLTQKEWLRVLIHLAQRRGFQSNRKTDGSSEDGQVLVNVTENDRLMEEKDYRTVAEMMVKDEKFSDHKRNKNGNYHGVVSRASLLVEIHTLFESQRQHHNFLASKDFELEYINIWSSQRPVATKDQIEKMIGTCTFLPKEKRAPKASWHFQYFMLLQTINHIRITNAQGTRPLNKEEIEQVVNMALTKSKVSYHDIRKVLDLSEEYQFVGLDYGKEDEKKKVESKETIIKLDDYHKLNKIFNEVELAKGETWEAVDYDTVAYALTFFKDDEDIRDYLQNKYKDSKNRLVKNVANKEYTNELIEKVSTLSFRKVGHLSLKALRKIIPFLEQGMTYDKACQAAGFNFQGISKKKRSVVLPVIDQISNPVVNRALTQTRKVINALIKKYGSPETIHIETARELSKRFDERKNITKDYKENRDKNERAKKHLSELGIINPTGLDIVKYKLWCEQQGRCMYSNQPISFERLRESGYTEVDHIIPYSRSMNDSYNNRVLVMTRENREKSNQTPYEYMGNDTQRWDEFEQRVTTNPQIKKEKRQNLLLKGFTNRRELEMLERNLNDTRHITKYLSHFISTNLEFSPSDKKKKVVNTSGRITSHLRSRWGLEKNREQNDLHHAMDAVVIAVTSDSFIQQVTNYYKRKERRELNGDDKFPLPWKFFREEVIARLSPNPKEQIEALPNHFYSEDELADLQPIFVSRMPKRSITGEAHQAQFRRVVGKTKEGKNITAKKTALVDISYDKNGDFNMYGRETDPATYEAIKERYLEFGGNAKKAFSTDLHKPKKDGTKGPLIKSVRIMENKTLVHPVNKGKGVVYNSSIVRTDVFQRKEKYYLLPVYVTDVTKGKLPNKVIAAKKGYDDWIEVDDSFTFLYSLYPNDLIFIRQNPKKKISLKKRIESHSISDSKEVQEILTYYKGVDSSTAAIEFITHDGSYYAKGVGVQNLDCFEKYQVDILGNYSKVKGEKRLELETSDNNHKGKDVNSIKSTSR

SEQ ID NO: 853 - protein, 103 aa, Butyrivibrio fibrisolvens
MISVGQSRKDLEDLGYEFKLSFYKEDIIEYEKNGDILVERFLSRTMPQVRNYIETKPIDRPKYDKRNPVGLSKTSSIRKITMDILGNRFYVDKMSFNNVVGTQ

SEQ ID NO: 854 - protein, 177 aa, Butyrivibrio fibrisolvens
MLIAFSQMGYDAYHELTNKYIDFETGEIIDKEGFNELLNNDLVYKNTMYESKWLKIKGNIEKAAEKNKYWYQVNKKCNRGLCNQTVYGTRESDGDVYKISKIDIRTDDGFKKFKNIVDKGNESVFLMYENDPKTFELIMDIYKNYSDSKNPFVQYEKETGDIIRKYSKKITGQRFLN

SEQ ID NO: 855 - protein, 1442 aa, Caenispirillum salinarum
MPVLSPLSPNAAQGRRRWSLALDIGEGSIGWAVAEVDAEGRVLQLTGTGVTLFPSAWSNENGTYVAHGAADRAVRGQQQRHDSRRRRLAGLARLCAPVLERSPEDLKDLTRTPPKADPRAIFFLRADAARRPLDGPELFRVLHHMAAHRGIRLAELQEVDPPPESDADDAAPAATEDEDGTRRAAADERAFRRLMAEHMHRHGTQPTCGEIMAGRLRETPAGAQPVTRARDGLRVGGGVAVPTRALIEQEFDAIRAIQAPRHPDLPWDSLRRLVLDQAPIAVPPATPCLFLEELRRRGETFQGRTITREAIDRGLTVDPLIQALRIRETVGNLRLHERITEPDGRQRYVPRAMPELGLSHGELTAPERDTLVRALMHDPDGLAAKDGRIPYTRLRKLIGYDNSPVCFAQERDTSGGGITVNPTDPLMARWIDGWVDLPLKARSLYVRDVVARGADSAALARLLAEGAHGVPPVAAAAVPAATAAILESDIMQPGRYSVCPWAAEAILDAWANAPTEGFYDVTRGLFGFAPGEIVLEDLRRARGALLAHLPRTMAAARTPNRAAQQRGPLPAYESVIPSQLITSLRRAHKGRAADWSAADPEERNPFLRTWTGNAATDHILNQVRKTANEVITKYGNRRGWDPLPSRITVELAREAKHGVIRRNEIAKENRENEGRRKKESAALDTFCQDNTVSWQAGGLPKERAALRLRLAQRQEFFCPYCAERPKLRATDLFSPAETEIDHVIERRMGGDGPDNLVLAHKDCNNAKGKKTPHEHAGDLLDSPALAALWQGWRKENADRLKGKGHKARTPREDKDFMDRVGWRFEEDARAKAEENQERRGRRMLHDTARATRLARLYLAAAVMPEDPAEIGAPPVETPPSPEDPTGYTAIYRTISRVQPVNGSVTHMLRQRLLQRDKNRDYQTHHAEDACLLLLAGPAVVQAFNTEAAQHGADAPDDRPVDLMPTSDAYHQQRRARALGRVPLATVDAALADIVMPESDRQDPETGRVHWRLTRAGRGLKRRIDDLTRNCVILSRPRRPSETGTPGALHNATHYGRREITVDGRTDTVVTQRMNARDLVALLDNAKIVPAARLDAAAPGDTILKEICTEIADRHDRVVDPEGTHARRWISARLAALVPAHAEAVARDIAELADLDALADADRTPEQEARRSALRQSPYLGRAISAKKADGRARAREQEILTRALLDPHWGPRGLRHLIMREARAPSLVRIRANKTDAFGRPVPDAAVWVKTDGNAVSQLWRLTSVVTDDGRRIPLPKPIEKRIEISNLEYARLNGLDEGAGVTGNNAPPRPLRQDIDRLTPLWRDHGTAPGGYLGTAVGELEDKARSALRGKAMRQTLTDAGITAEAGWRLDSEGAVCDLEVAKGDTVKKDGKTYKVGVITQGIFGMPVDAAGSAPRTPEDCEKFEEQYGIKPWKAKGIPLA

SEQ ID NO: 856 - protein, 984 aa, Campylobacter coli
MARILAFDIGISSIGWAFSENDELKDCGVRIFTKAENPKTGESLALPRRLARSARKCLARRKARLNHLKHLIANEFKLNYEDYQSFDESLAKAYKGSLISPYELRFRALNELLSKQDFARVILHIAKRRGYDDIKNNGDEEKSEILKAIKQNEEKLVNYQSVGEYLYKEYFQKFKENSKEFINVRNKKESYERCIAQSFLKDELKLIFQKQREFGFSFSKKFEEEVLSVAFYKRALKDFSHLVGNCSFFTDEKRAPKNSPLAFMFVALTRIINLLNNLKNTEGILYTKDDLNALLNEVLKNGTLTYKQTKKLLGLSDDYEFKGEKGTYFIEFKKYKEFIKALGEHNLSQDDLNEIAKDITLIKDEIKLKKALAKYDLNQNQIDSLSKLEFKDHLNISFKALKLITPLMLEGKKYDEACNELNLKVAINEDKKDFLPAFNETYYKDEVTNPVVLRAIKEYRKVLNALLKKYGKVHKINIELAREVGKNHSQRAKIEKEQNENYKAKKDAELECEKLGLKINSKNILKLRLFKEQKEFCAYSGEKIKISDLQDEKMLEIDHIYPYSRSFDDSYMNKVLVFTKQNQEKLNQTPFEAFGNDSAKWQKIEVLAKNLPTKKQKRILDKNYKDKEQKNFKDRNLNDTRYIARLVLNYTKDYLDFLPLSDDENTKLNDTQKGSKVHVEAKSGMLTSALRHTWGFSAKDRNNHLHHAIDAVIIAYANNSIVKAFSDFKKEQESNSAELYAKKISELDYKNKRKFFEPFSGFRQKVLDKIDEIFVSKPERKKPSGALHEETFRKEEEFYQSYGGKEGVLKALELGKIRKVNGKIVKNGDMFRVDIFKHKKTNKFYAVPIYTMDFALKVLPNKAVARSKKGEIKDWILMDENYEFCFSLYKDSLILIQTKDMQEPEFVYYNAFTSSTVSLIVSKHDNKFETLSKNQKILFKNANEKEVIAKSIGIQNLKVFEKYIVSALGEVTKAEFRQREDFKK

SEQ ID NO: 857 - protein, 984 aa, Campylobacter coli
MARILAFDIGISSIGWAFSENDELKDCGVRIFTKAENPKTGESLALPRRLARSARKRLARRKARLNHLKHLIANEFKLNYEDYQSFDESLAKAYKGSLISPYELRFRALNELLSKQDFARVILHIAKRRGYDDIKNNGDEEKGKILKAIKQNEEKLVNYQSVGEYLYKEYFQKFKENSKEFINVRNKKESYERCITQSFLKYELKLIFQKQREFGFSFSKKFEEEVLSVAFYKRALKDFSHLVGNCSFFSDEKRAPKNSPLAFMFVALTRIINLLNNLKNTEGILYTKDDLNALLNEVLKNGTLTYKQTKKLLGLSDDYEFKGEKGTYFIEFKKYKEFIKALGEHNLSQDDLNEIAKDITLIKDEIKLKKALAKYDLNQNQIDSLSKLEFKDHLNISFKALKLITPLMLEGKKYDEACNELNLKVAINEDKKDFLPAFNETYYKDEVTNPVVLRAIKEYRKVLNALLKKYGKVHKINIELAREVGKNYSQRAKIEKEQNENYKAKKDAELECEKLGLKINSKNILKLRLFKEQKEFCAYSGEKIKISDLQDEKMLEIDHIYPYSRSFDDSYMNKVLVFTKQNQEKLNQTPFEAFGNDSAKWQKIEVLAKNLPTKKQKRILDKNYKDKEQKNFKDRNLNDTRYIARLVLNYTKDYLDFLPLSDDENTKLNDTQKGSKVHVEAKSGMLTSALRHTWGFSAKDRNNHLHHAIDAVIIAYANNSIVKAFSDFKKEQESNSAELYAKKISELDYKNKRKFFEPFSGFRQKVLDKIDEIFVSKPERKKPSGALHEETFRKEEEFYQSYGGKEGVLKALELGKIRKVNGKIVKNGDMFRVDIFKHKKTNKFYAVPIYTMDFALKVLPNKAVARSKKGEIKDWILMDENYEFCFSLYKDSLILIQTKDMQEPEFVYYNAFTSSTVSLIVSKHDNKFETLSKNQKILFKNANEKEVIAKSIGIQNLKVFEKYIVSALGEVTKAEFRQREDFKK

SEQ ID NO: 858 - protein, 984 aa, Campylobacter coli
MARILAFDIGISSIGWAFSENDELKDCGVRIFTKAENPKTGESLALPRRLARSARKRLARRKARLNHLKHLIANEFKLNYEDYQSFDESLAKAYKGSLISPYELRFRALNELLSKQDFARVILHIAKRRGYDDIKNNGDEEKSEILKAIKQNEEKLVNYQSVGEYLYKEYFQKFKENSKEFINVRNKKESYERCIAQSFLKDELKLIFQKQREFGFSFSKKFEEEVLSVAFYKRALKDFSHLVGNCSFFTDEKRAPKNSPLAFMFVALTRIINLLNNLKNTEGILYTKDDLNTLLNEVLKNGTLTYKQTKKLLGLSDDYEFKGEKGTYFIEFKKYKEFIKALGEHNLSQDNLNEIAKDITLIKDEIKLKKALAKYDLNQNQIDSLSKLEFKDHLNISFKALKLITPLMLEGKKYDEAYNELNLKVAINEDKKDFLPAFNETYYKDEVTNPVVLRAIKEYRKVLNALLKKYGKVHKINIELAREVGKNHSQRAKIEKEQNENYKAKKDAELECEKLGLKINSKNILKLRLFKEQKEFCAYSGEKIKISDLQDEKMLEIDHIYPYSRSFDDSYMNKVLVFTKQNQEKLNQTPFEAFGNDSAKWQKIEVLAKNLPTKKQKRILDKNYKDKEQKDFKDRNLNDTRYIARLVLNYTKDYLDFLPLSDDENTKLNDTQKGSKVHVEAKSGMLTSALRHTWGFSAKDRNNHLHHAIDAVIIAYANNSIVKAFSDFKKEQESNSAELYAKKISELDYKNKRKFFEPFSGFRQKVLDKIDEIFVSKPERKKPSGALHEETFRKEEEFYQSYGGKEGVLKALELGKIRKVNGKIVKNGDMFRVDIFKHKKTNKFYAVPIYTMDFALKVLPNKAVARSKKGEIKDWILMDENYEFCFSLYKDSLILIQTKDMQEPELVYFNAFTSSTVSLIVSKHDNKFETLSKNQKILFKNANEKEVIAKSIGIQNLKVFEKYIVSALGEVTKAEFRQREDFKK

SEQ ID NO: 859 - protein, 984 aa, Campylobacter coli
MARILAFDIGISSIGWAFSENDELKDCGVRIFTKAENPKTGESLALPRRLARSARKRLARRKARLNHLKHLIANEFKLNYEDYQSFDESLAKAYKGSLISPYELRFRALNELLSKQDFARVILHIAKRRGYDDIKNNGDEEKSEILKAIKQNEEKLVNYQSVGEYLYKEYFQKFKENSKEFINVRNKKESYERCIAQSFLKDELKLIFQKQREFGFSFSKKFEEEVLSVAFYKRALKDFSHLVGNCSFFTDEKRAPKNSPLAFMFVALTRIINLLNNLKNTEGILYTKDDLNALLNEVLKNGTLTYKQTKKLLGLSDDYEFKGEKGTYFIEFKKYKEFIKALGEHNLSQDDLNEIAKDITLIKDEIKLKKALAKYDLNQNQIDSLSKLEFKDHLNISFKALKLITPLMLEGKKYDEACNELNLKVAINEDKKDFLPAFNETYYKDEVTNPVVLRAIKEYRKVLNALLKKYGKVHKINIELAREVGKNYSQRAKIEKEQNENYKAKKDAELECEKLGLKINSKNILKLRLFKEQKEFCAYSGEKIKISDLQDEKMLEIDHIYPYSRSFDDSYMNKVLVFTKQNQEKLNQTPFEAFGNDSAKWQKIEVLAKNLPTKKQKRILDKNYKDKEQKNFKDRNLNDTRYIARLVLNYTKDYLDFLPLSDDENTKLNDTQKGSKVHVEAKSGMLTSALRHTWGFSAKDRNNHLHHAIDAVIIAYANNSIVKAFSDFKKEQESNSAELYAKKISELDYKNKRKFFEPFSGFRQKVLDKIDEIFVSKPERKKPSGALHEETFRKEEEFYQSYGGKEGVLKALELGKIRKVNGKIVKNGDMFRVDIFKHKKTNKFYAVPIYTMDFALKVLPNKAVARSKKGEIKDWILMDENYEFCFSLYKDSLILIQTKDMQEPEFVYYNAFTSSTVSLIVSKHDNKFETLSKNQKILFKNANEKEVIAKSIGIQNLKVFEKYIVSALGEVTKAEFRQREDFKK

SEQ ID NO: 860 - protein, 987 aa, Campylobacter coli
MARILAFDIGISSIGWAFSENDELKDCGVRIFTKAENPKTGESLALPRRLARSARKRLARRKARLNHLKHLIANEFKLNYEDYQSFDESLAKAYKGSLISPYELRFRALNELLSKQDFARVILHIAKRRGYDDIKNNGDEEKSEILKAIKQNEEKLVNYQSVGEYLYKEYFQKFKENSKEFINVRNKKESYERCIAQSFLKDELKLIFQKQREFGFSFSKKFEEEVLSVAFYKRALKDFSHLVGNCSFFTDEKRAPKNSPLAFMFVALTRIINLLNNLKNTEGILYTKDDLNTLLNEVLKNGTLTYKQTKKLLGLSDDYEFKGEKGTYFIEFKKYKEFIKALGEHNLSQDNLNEIAKDITLIKDEIKLKKALAKYDLNQNQIDSLSKLEFKDHLNISFKALKLITPLMLEGKKYDEAYNELNLKVAINEDKKDFLPAFNETYYKDEVTNPVVLRAIKEYRKVLNALLKKYGKVHKINIELAREVGKNHSQRAKIEKEQNENYKAKKDAELECEKLGLKINSKNILKLRLFKEQKEFCAYSGEKIKISDLQDEKMLEIDHIYPYSRSFDDSYMNKVLVFTKQNQEKLNQTPFEAFGNDSAKWQKIEVLAKNLPTKKQKRILDKNYKDKEQKDFKDRNLNDTRYIARLVLNYTKDYLDFLPLSDDENTKLNDTQKGSKVHVEAKSGMLTSALRHTWGFSAKDRNNHLHHAIDAVIIAYANNSIVKAFSDFKKEQESNSAELYAKKISELDYKNKRKFFEPFSGFRQKVLDKIDEIFVSKPERKKPSGALHEETFRKEEEFYQSYGGKEGVLKALELGKIRKVNGKIVKNGDMFRVDIFKHKKTNKFYAVPIYTMDFALKVLPNKAVARSKKGEIKDWILMDENYEFCFSLYKDSLILIQTKDMQEPELVYFNAFTSSTVSLIVSKHDNKFETLSKNQKILFKNANEKEVIAKSIGIQNLKVFEKYIVSALGEVTKAEFRQREDFKNELR

SEQ ID NO: 861 - protein, 984 aa, Campylobacter coli
MARILAFDIGISSIGWAFSENDELKDCGVRIFTKAENPKTGESLALPRRLARSARKRLARRKARLNHLKHLIANEFKLNYEDYQSFDESLAKAYKGSLISPYELRFRALNELLSKQDFARVILHIAKRRGYDDIKNNGDEEKSEILKAIKQNEEKLVNYQSVGEYLYKEYFQKFKENSKEFINVRNKKESYERCIAQSFLKDELKLIFQKQREFGFSFSKKFEEEVLSVAFYKRALKDFSHLVGNCSFFTDEKRAPKNSPLAFMFVALTRIINLLNNLKNTEGILYTKDDLNTLLNEVLKNGTLTYKQTKKLLGLSDDYEFKGEKGTYFIEFKKYKEFIKALGEHNLSQDNLNEIAKDITLIKDEIKLKKALAKYDLNQNQIDSLSKLEFKDHLNISFKALKLITPLMLEGKKYDEAYNELNLKVAINEDKKDFLPAFNETYYKDEVTNPVVLRAIKEYRKVLNALLKKYGKVHKINIELAREVGKNHSQRAKIEKEQNENYKAKKDAELECEKLGLKINSKNILKLRLFKEQKEFCAYSGEKIKISDLQDEKMLEIDHIYPYSRSFDDSYMNKVLVFTKQNQEKLNQTPFEAFGNDSAKWQKIEVLAKNLPTKKQKRILDKNYKDKEQKDFKDRNLNDTRYIARLVLNYTKDYLDFLPLSNDENTKLNDTQKGSKVHVEAKSGMLTSALRHTWGFSAKDRNNHLHHAIDAVIIAYANNSIVKAFSDFKKEQESNSAELYAKKISELDYKNKRKFFEPFSGFRQKVLDKIDEIFVSKPERKKPSGALHEETFRKEEEFYQSYGGKEGVLKALELGKIRKVNGKIVKNGDMFRVDIFKHKKTNKFYAVPIYTMDFALKVLPNKAVARSKKGEIKDWILMDENYEFCFSLYKDSLILIQTKDMQEPELVYFNAFTSSTVSLIVSKHDNKFETLSKNQKILFKNANEKEVIAKSIGIQNLKVFEKYIVSALGEVTKAEFRQREDFKK

SEQ ID NO: 862 - protein, 987 aa, Campylobacter coli
MARILAFDIGISSIGWAFSENDELKDCGVRIFTKAENPKTGESLALPRRLARSARKRLARRKARLNHLKHLIANEFKLNYEDYQSFDESLAKAYKGSLISPYELRFRALNELLSKQDFARVILHIAKRRGYDDIKNSDDKEKGAILKAIKQNEEKLANYQSVGEYLYKEYFQKFKENSKEFTNVRNKKESYERCIAQSFLKDELKLIFKKQREFGFSFSKKFEEEVLSVAFYKRALKDFSHLVGNCSFFTDEKRAPKNSPLAFMFVALTRIINLLNNLKNTEGILYTKDDLNALLNEVLKNGTLTYKQTKKLLGLSDDYEFKGEKGTYFIEFKKYKEFIKALGDHSLSQDDLNEIAKDITLIKDEIKLKKALAKYDLNQNQIDSLSKLEFKDHLNISFKALKLITPLMLEGKKYDEACNELNLKVAINEDKKDFLPAFNETYYKDEVTNPVVLRAIKEYRKVLNALLKKYGKVHKINIELAREVGKNYSQRAKIEKEQNENYKAKKDAELECEKLGLKINSKNILKLRLFKEQKEFCAYSGEKIKISDLQDEKMLEIDHIYPYSRSFDDSYMNKVLVFTKQNQEKLNKTPFEAFGNDSTKWQKIEVLAKNLPEKKQKRILDKNYKDKEQKDFKDRNLNDTRYIARLVLNYTKDYLDFLPLSDDENTKLNDTQKGSKVHVEAKSGMLTSALRHTWGFSTKDRNNHLHHAIDAVIIAYANNSIVKAFSDFKKEQESNSAELYAKKISELDYKNKRKFFEPFSGFRQKVLDKIDEIFVSKPERKKPSGALHEETFRKEEEFYQSYGGKEGVLKALELGKIRKVNGKIVKNGDMFRVDIFKHKKTNKFYAVPIYTMDFALKVLPNKAVARSKKGEIKDWILMDENYEFCFSLYKDSLILIQTKDMQEPEFVYYNAFTSSTVSLIVSKHDNKFETLSKNQKILFKNANEKEVIAKSIGIQNLKVFEKYIVSALGEVTKAEFRQREDFKNELR

SEQ ID NO: 863 - protein, 984 aa, Campylobacter coli
MARILAFDIGISSIGWAFSENDELKDCGVRIFTKAENPKTGESLALPRRLARSARKRLARRKARLNHLKHLIANEFKLNYEDYQSFDESLAKAYKGSLISPYELRFRALNELLSKQDFARVILHIAKRRGYDDIKNSDDKEKGAILKAIKQNEEKLTNYQSVGEYLYKEYFQKFKENSKEFTNVRNKKESYERCIAQSFLKDELKLIFKKQREFGFSFSKKFEEEVLSVAFYKRALKDFSHLVGNCSFFTDEKRAPKNSPLAFMFVALTRIINLLNNLKNTEGILYTKDDLNALLNEVLKNGTLTYKQTKKLLGLSDDYEFKGEKGTYFIEFKKYKEFIKALGDHSLSQDDLNEIAKDITLIKDEIKLKKALAKYDLNQNQIDSLSKLEFKDHLNISFKALKLITPLMLEGKKYDEACNELNLKVAINEDKKDFLPAFNETYYKDEVTNPVVLRAIKEYRKVLNALLKKYGKVHKINIELAREVGKNYSQRAKIEKEQNENYKAKKDAELECEKLGLKINSKNILKLRLFKEQKEFCAYSGEKIKISDLQDEKMLEIDHIYPYSRSFDDSYMNKVLVFTKQNQEKLNQTPFEAFGNDSAKWQKIEVLAKNLPTKKQKRILDKNYKDKEQKDFKDRNLNDTRYIARLVLNYTKDYLDFLPLSDDENTKLNDTQKGSKVHVEAKSGMLTSALRHTWGFSAKDRNNHLHHAIDAVIIAYANNSIVKAFSDFKKEQESNSAELYAKKISELDYKNKRKFFEPFSGFRQKVLDKIDEIFVSKPERKKPSGALHEETFRKEEEFYQSYGGKEGVLKALELGKIRKVNGKIVKNGDMFRVDIFKHKKTNKFYAVPIYTMDFALKVLPNKAVARSKKGEIKDWILMDENYEFCFSLYKDSLILIQTKDMQEPEFVYYNAFTSSTVSLIVSKHDNKFETLSKNQKILFKNANEKEVIAKSIGIQNLKVFEKYIVSALGEVTKAEFRQREDFKK

SEQ ID NO: 864 - protein, 965 aa, Campylobacter coli
MKIIGFNLGIANIGWALRENDEIIDCGVRVFDIPENPKNGNSLALERRENKARMKIVKRKKARMLATKTFLKKELNVDLSKLFLIGSTQSIYELRTKALSSLISKEELSAIILHIAKHRGYDDSALKNENGTIIEALNKNKEAMLKFKSVGEYFYKNFVQNKEVKKIRNTTEDYSNSVPRSLLKQELDLILDKQKELGLIKNADFKAKLFEIIFFKRPLKDFSNKIGNCIFFENEKRAAKNTISACEFVALGKVVNLLKSIEKDIGIVYEKDSINEIMSIILDKTSISYKKIRDILNLPQDINFKGLDYSKNNVENSKLVDLKKLNEFKKALGDGFTNLDKDILDSIATDITLTKDTATLKEKLKNYNVLNAEQIEKLSELVFNDHINLSLKALKQIIPLMYEGKRYDEACELCNFTIAKNQEKNEYLPLFEKTRFAKDISSPVVIRAICEFRKLLNDIIRRYGSVHKIHLELTRDFGISFNDRKKIIKEIEQNEQSRIKALETIKELKLEETSKNIQIVRLFEDQKGICPYSGLKMDLKCLDELVIDYIRPYNRSLDDSYSNKVLTFKKLNDLKQGKTPFEAFGEDEKLWAEINERIKEYNGKKRFKIFDKFFKDKKPFDFTEQTLQDTRWLTKLVASYLNEYLSFLPISEDENTALGYGEKGSKQHVILSSGMITQMLRNFWYLGFKNHKDYKNNAMDAIIVAFTTNSIIFTFNNFKKELDLAKAEFYANKISESDYLLKRKFLPPFSGFKEQALEKVKNIFVSHSLKIKNKGTLHELTPLKIKELKNTYGDLDLAVKLGKIRKYNDKYYANAKGSLVRTDLFADKENKFHAVSIYKADFSTKKLPNKTPATTSNGETKEGIEMNENYNFCMSLYKNTPISVKIKGMKEPIICYYHGFNTSGSKITYKKHDNNYHNLSEDEMVVFRKNDKESIVVGKILEIKKYSISPSGELSLIENEERKWF

SEQ ID NO: 865 - protein, 965 aa, Campylobacter coli
MKIIGFNLGIANIGWALRENDEIIDCGVRVFDIPENPKNGNSLALERRENKARMKIVKRKKARMLATKTFLKKELNVDLSKLFLIGSTQSIYELRTKALSSLISKEELSAIILHIAKHRGYDDSALKNENGTIIEALNKNKEAMLKFKSVGEYFYKNFVQNKEVKKIRNTTEDYSNSVPRSLLKQELDLILDKQKELGLIKNADFKAKLFEIIFFKRPLKDFSNKIGNCIFFENEKRAAKNTISACEFVALGKVVNLLKSIEKDIGIVYEKDSINEIMSIILDKTSISYKKIRDILNLPQDINFKGLDYSKNNAENSKLVDLKKLNEFKKALGDGFANLDKDILDSIATDITLTKDTATLKEKLKNYNVLNAEQIEKLSELVFNDHINLSLKALKQIIPLMYEGKRYDEACELCNFTIAKNQEKNEYLPLFEKTRFAKDISSPVVIRAICEFRKLLNDIIRRYGSVHKIHLELTRDFGISFNDRKKIIKEIEQNEQSRIKALETIKELKLEETSKNIQIVRLFEDQKGICPYSGLKMDLKCLDELVIDYIRPYNRSLDDSYSNKVLTFKKLNDLKQGKTPFEAFGEDEKLWAEINERIKEYNGKKRFKIFDKFFKDKKPFDFTEQTLQDTRWLTKLVASYLNEYLSFLPISEDENTALGYGEKGSKQHVVLSSGMITQMLRNFWYLGFKNHKNYKNNAMDAIIVAFTTNSIIFAFNNFKKELDLAKAEFYANKISESDYLLKRKFLPPFSGFKEQALEKVKNIFVSHSLKIKNKGTLHELTPLKIKELKNTYGDLDLAVKLGKIRKYNDKYYANTKGSLVRTDLFVDKENKFHAVSIYKADFSTKKLPNKTPATTSNGETKEGIEMNENYNFCMSLYKNTPVSVKIKGMKEPIICYYHGFNTSGSKITYKKHDNNYHNLSEDEMVVFRKNDKESIVVGKILEIKKYSISPSGELSLIENEKRKWF

SEQ ID NO: 866 - protein, 965 aa, Campylobacter coli
MKIIGFNLGIANIGWALRENDEIIDCGVRVFDIPENPKNGNSLALERRENKARMKIVKRKKARMLATKTFLKKELNVDLSKLFLIGSTQSIYELRTKALSSLISKEELSAIILHIAKHRGYDDSALKNENGTIIEALNKNKEAMLKFKSVGEYFYKNFVQNKEVKKIRNTTEDYSNSVPRSLLKQELDLILDKQKELGLIKNADFKEKLFEIIFFKRPLKDFSNKIGNCIFFENEKRAAKNTISACEFVALGKVVNLLKSIEKDIGIVYEKDSINEIMSIILDKTSISYKKIRDILNLPQDINFKGLDYSKNNAENSKLVDLKKLNEFKKALGDGFANLDKDILDSIATDITLTKDTATLKEKLKNYNVLNAEQIEKLSELVFNDHINLSLKALKQIIPLMYEGKRYDEACELCNFTIAKNQEKNEYLPLFEKTRFAKDISSPVVIRAICEFRKLLNDIIRRYGSVHKIHLELTRDFGISFNDRKKIIKEIEQNEQSRIKALETIKELKLEETSKNIQIVRLFEDQKGICPYSGLKMDLKCLDELVIDYIRPYNRSLDDSYSNKILTFKKLNDLKQGKTPFEAFGEDEKLWAEINERIKEYNGKKRFKIFDKFFKDKKPFDFTEQTLQDTRWLTKLVASYLNEYLLFLPINEDENTALGYGEKGSKQHVVLSSGMITQMLRNFWYLGFKNHKDYKNNAMDAIIVAFTTNSIIFAFNNFKKELDLAKAEFYANKISESDYLLKRKFLPPFSGFKEQALEKVKNIFVSHSLKIKNKGTLHELTPLKIKELKNTYGDLDLAVKLGKIRKYNDKYYANAKGSLVRTDLFADKENKFHAVSIYKADFSTKKLPNKTPATTSNGETKEGIEMNENYNFCMSLYKNTPISVKIKGMKEPIICYYHGFNTSGSKITYKKHDNNYHNLSEDEMVVFRKNDKESIVVGKILEIKKYSISPSGELSLIENEERKWF

SEQ ID NO: 867 - protein, 933 aa, Campylobacter coli
MKIIGFNLGIANIGWALRENDEIIDCGVRVFDIPENPKNGNSLALERRENKARMKIVKRKKARMLATKTFLKKELNVDLSKLFLIGSTQSIYELRTKALSSLISKEELSVIILHIAKHRGYDDSALKNENGTIIEALNKNKETMLKFKSVGEYFYKNFVQNKEVKKIRNTTEDYSNSVPRSLLKQELDLILDRQKELGLIKNADFKAKLFEIIFFKRPLKDFSNKIGNCIFFENEKRAAKNTISACEFVALGKVVNLLKSIEKDIGIVYEKDSINEIMSIILDKTSISYKKIRDILNLPQDINFKGLDYSKNNVENSKLVDLKKLNEFKKALGDGFTNLDKDILDSIATDITLTKDTATLKEKLKNYNVLNAEQIEKLSELVFNDHINLSLKALKQIIPLMYEGKRYDEACELCNFTIAKNQEKNEYLPLFEKTRFAKDISSPVVIRAICEFRKLLNDIIRRYGSVHKIHLELTRDFGISFNDRKKIIKEIEQNEQSRIKALETIKELKLEETSKNIQIVRLFEDQKGICPYSGLKMDLKCLDELVIDYIRPYNRSLDDSYSNKVLTFKKLNDLKQGKTPFEAFGEDEKLWAEINERIKEYNGKKRFKIFDKFFKDKKPFDFTEQTLQDTRWLTKLVASYLNEHLSFLPISEDENTALGYGEKGSKQHVILSSGMITQMLRNFWYLGFKNHKDYKNNAMDAIIVAFTTNSIIFTFNNFKKELDLAKAEFYANKISESDYLLKRKFLPPFSGFKEQALEKVKNIFVSHSLKIKNKGTLHELTPLKIKELKNTYGDLDLAVKLGKIRKYNDKYYANANGSLVRSDLFIDKKNKFHAVPIYKADFSTKKLPNKTPATTSNGETKEGIEMNENYNFCMSLYKNTPISVKIKGMKESIICYYHGFNTSGSKITYKKHDNNYHNLSEDEMVVFRKNDKE

SEQ ID NO: 868 - protein, 666 aa, Campylobacter jejuni
KGEKGTYFIEFKKYKEFIKALDEHSLSQDDLNEIAKDITLIKDEIKLKKALAKYDLKENQIDSLSKLEFKDHLNISFKALKLITPLMLEGKKYDEACNELNLKVAINEDKKDFLPAFNETYYKDEVTNPVVLRAIKEYRKILNALLKKYGKVHKINIELAREVGKNHSQRAKIEKEQNENYKAKKDAELECEKLGLKINSKNILKLRLFKEQKEFCVYSGEKIKLSDLQDEKMLEIDHIYPYSRSFDDSYMNKVLVFAKQNQEKLNKTPFEAFGNDSTKWQKIEVLTKNLPTKKQKRILDKNYKDKEQKDFKDRNLNDTRYIARLVLNYTKDYLDFLPLSDDENTKLNDTQKGSKVHVEAKSGMLTSALRHTWGFSTKDRNNHLHHAIDAAIIAYANNSIVKAFSDFKKEQESNSAELYAKKISELDYKNKRKFFEPFSGFRQKVLDKIDEIFVSKPERKKPSGALHEETFRKEEEFYQSYGGKEGVLKALELGKIRKVNGKIVKNGDMFRVDIFKHKKTNKFYAVPIYTMDFALKVLPNKAVARSKKGEIKDWILMDEDYEFCFSLYKDSLILIQTKDMQEPELVYFNAFTSSTVSLIVSKHDNKFETLSKNQKILFKNANEKEVIAKSIGIQNLKVFEKYIVSALGEVTKAEFRQREDFKNELR

SEQ ID NO: 869 - protein, 190 aa, Campylobacter jejuni
MAFDIGISSIGWAFSENDELKDCGVRIFTKVENPKTGESLALPRRLARSARKRLARRKARLNHLKHLIANEFKLNYEDYQSFDESLAKAYKGSLISPYELRFRALNELLSKQDFARVILHIAKRRGYDDIKNSDDKEKGAILKAIKQNEEKLANYQSVGEYLYKEYFQKFKENSKEFTNVRNKKKVMNAA

SEQ ID NO: 870 - protein, 985 aa, Campylobacter jejuni
MAKILAFDIGISSIGWAFVENDELKDCGVRIFTKAENPKTGESLALPRRLARSARKRLARRKARLNHLKHLIANEFKLNYEDYQSFDESLAKAYKGTLISPYELRFKALNELLSKQDLARVILHIAKRRGYDNIKNSDDKEKGAILKAVKENEEKLANYKSVGEYLYKEYFQKFKENSKEFINVRNKKESYERCIAQSFLKDELKLIFQKQREFGFNFSKKFEEEVLSVAFYKRALKDFSHLVGNCSFFVDEKRAPKNSPLAFEFVALTRIVNLLNNLNKNNSYIKDDLNALLSEVLKNGTLTYKQTKKILGLSDDYEFKGQKGNYFIEFKKYKEFIKALCEHNLNQDDLNEIAKDITLVKDETKLKKALAKYDLNQNQIENLSKIEFKDHLNISFKALKLIVPLMREGKKYDEVCNELNLKTAINEDKKEFLPAFNETYYKDEVNNPVVLRAIKEYRKVLNSLLKKYGKVHKINIELAREVGKNHRERSKIEKEQNENFKAKKDAELECEKLGLKINSKNILKLRLFKEQKEFCVYSGEKIKISDLQDEKMLEIDHIYPYSRSFDDSYMNKVLVFTKQNQEKLNKTPFEAFGKDDVKWQKIETLAKNLPAKKQKRILDKNYKDKEQKDFKDRNLNDTRYIARLVLNYTKDYLEFLPLSDDENIKLNDTQKGSKVHVEAKSGMLTSVLRHTWGFSTKDRNNHLHHAIDAVIIAYANASVVKAFSDFKKEQENYTAELYAKKINELDFKNKRKFFEPFSNFRQKVLEKIDEIFVSKPERKKPSGALHEETFYKEEEFYKEYGGKEGVLKALELGKIRKVNGKIVSNANMFRVDIFKYKKTNKFYAVPIYTMDFALGILPNKAVVGGKDKQGIIKDWLLMDENYEFCFSLYKDSLILLQTKDMQEPELVYFKSFKSSTAGLVVSKHDNKFENLNENQKKLFKSANEKKVVAEGIGIQNLKVFEKYIVSALGEITKAEIKERENFKKK

SEQ ID NO: 871 - protein, 987 aa, Campylobacter jejuni
MARILAFDIGISSIGWAFSENDELKDCGVRIFTKAENPKTGESLALPRCLARSARKRLARRKARLNHLKHLIANEFKLNYEDYQSFDESLAKAYKGSLISPYELRFRALNELLSKQDFARVILHIAKRRGYDDIKNNGDEEKGEILKAIKQNEEKLVSYQSVGEYLYKEYFQKFKENSKEFINVRNKKESYERCIAQSFLKDELKLIFQKQRKFGFSFSKKFEEEVLSVAFYKRALKDFSHLVGNCSFFTDEKRAPKNSPLAFMFVALTRIINLLNNLKNTEGILYTKDDLNTLLNEVLKNGTLTYKQTKKLLGLSNDYEFKGEKGTYFIEFQKYKEFVKALGEHNLSQDDLNEIAKDITLIKDEIKLKKALAKYDLNQNQIDSLSKLEFKDHLNISFKALKLITPLMLEGKKYDEACNELNLKVAINEDKKDFLPAFNETYYKDEVTNPVVLRAIKEYRKVLNALLKKYGKVHKINIELAREVGKNHSQRAKIEKEQNENYKAKKDAELECEKLGLKINSKNILKLRLFKEQKEFCVYSGEKIKISDLQDEKMLEIDHIYPYSRSFDDSYMNKVLVFTKQNQEKLNKTPFETFGNDRVKWQKIEVLAKNLPTKKQKRILDKNYKDKEQKDFKDRNLNDTRYIARLVLNYTKDYLDFLPLSDDENTKLNDTQKGSKVHVEAKSGMLTSTLRHTWGFSTKDRNNHLHHAIDAAIIAYANNSIVKAFSDFKKEQESNTAELYAKKISELDYKNKRKFFEPFSGFRQKLLDKIDEIFVSKPERKKPSGALHEETFRKEEEFYQSYGGKEGVLKALELGKIRKVNGKIVSNGDMFRVDIFKHKKTNKFYAVPIYTMDFALKVLPNKAVVQGKDKKSGLIKDWILMDENYEFCFSLYKDSLILIQTKDMQEPELVYYERLDSSNASLTVSKHDNKFETLSKNQKILFKNANEKEVIAKSIGIQNLKVFEKYIVSALGEVTKAEFRQREDFKK

SEQ ID NO: 872 - protein, 987 aa, Campylobacter jejuni
MARILAFDIGISSIGWAFSENDELKDCGVRIFTKAENPKTGESLALPRRLARSARKRLARRKARLNHLKHLIANEFKLNYEDYQSFDEGLAKAYKGSLISPYELRFRALNELLSKQDFARVILHIAKRRGYDDIKNNGDEEKSEILKAIKQNEEKLVNYQSVGEYLYKEYFQKFKENSKEFINVRNKKESYERCIAQSFLKDELKLIFQKQREFGFSFSKKFEEEVLSVAFYKRALKDFSHLVGNCSFFTDEKRAPKNSPLAFMFVALTRIINLLNNLKNTEGILYTKDDLNTLLNEVLKNGTLTYKQTKKLLGLSDDYEFKGEKGTYFIEFKKYKEFIKALGEHNLSQDNLNEIAKDITLIKDEIKLKKALAKYDLNQNQIDSLSKLEFKDHLNISFKALKLITPLMLEGKKYDEAYNELNLKVAINEDKKDFLPAFNETYYKDEVTNPVVLRAIKEYRKVLNALLKKYGKVHKINIELAREVGKNHSQRAKIEKEQNENYKAKKDAELECEKLGLKINSKNILKLRLFKEQKEFCAYSGEKIKISDLQDEKMLEIDHIYPYSRSFDDSYMNKVLVFTKQNQEKLNQTPFEAFGNDSAKWQKIEVLAKNLPTKKQKRILDKNYKDKEQKDFKDRNLNDTRYIARLVLNYTKDYLDFLPLSDDENTKLNDTQKGSKVHVEAKSGMLTSALRHTWGFSAKDRNNHLHHAIDAVIIAYANNSIVKAFSDFKKEQESNSAELYAKKISELDYKNKRKFFEPFSGFRQKVLDKIDEIFVSKPERKKPSGALHEETFRKEEEFYQSYGGKEGVLKALELGKIRKVNGKIVKNGDMFRVDIFKHKKTNKFYAVPIYTMDFALKVLPNKAVVQGKDKKSGLIKDWILMDENYEFCFSLYKDSLILIQTKDMQEPELVYFNAFTSSTVSLIVSKHDNKFETLSKNQKILFKNANEKEVIAKSIGIQNLKVFEKYIVSALGEVTKAEFRQREDFKK

SEQ ID NO: 873 - protein, 961 aa, Campylobacter jejuni
MARILAFDIGISSIGWAFSENDELKDCGVRIFTKAENPKTGESLALPRRLARSARKRLARRKARLNHLKHLIANEFKLNYEDYQSFDESLAKAYKGSLISPYELRFRALNELLSKQDFARVILHIAKRRGYDDIKNNGDEEKGKILKAIKQNEEKLVNYQSVGEYLYKEYFQKFKENSKEFINVRNKKESYERCITQSFLKYELKLIFQKQREFGFSFSKKFEEEVLSVAFYKRALKDFSHLVGNCSFFSDEKRAPKNSPLAFMFVALTRIINLLNNLKNTEGILYTKDDLNALLNEVLKNGTLTYKQTKKLLGLSDDYEFKGEKGTYFIEFKKYKEFIKALGEHNLSQDDLNEIAKDITLIKDEIKLKKALAKYDLNQNQIDSLSKLEFKDHLNIGFKALKLITPLMLEGKKYDEACNELNLKVAINEDKKDFLPAFNETYYKDEVTNPVVLRAIKEYRKVLNALLKKYGKVHKINIELAREVGKNHSQRAKIEKEQNENYKAKKDAELECEKLGLKINSKNILKLRLFKEQKEFCAYSGEKIKLSDLQDEKMLEIDHIYPYSRSFDDSYMNKVLVFTKQNQEKLNKTPFEAFGNDNVKWQKIEVLAKNLPEKKQKRILDKNYKDKEQKDFKDRNLNDTRYIARLVLNYTKDYLDFLPLSDDENTKLKGSKVHVEAKSGMLTSALRHTWGFSTKDRNNHLHHAIDAAIIAYANNSIVKDFSDFKKEQESNSAELYAKKISELDYKNKRKFFEPFSGFRQKVLDKIDEIFVSKPERKKPSGALHEETFRKEEEFYQSYGGKEGVLKALELGKIRKVNGKIVKNGDMFRVDIFKHKKTNKFYAVPIYTMDFALKVLPNKAVARSKKGEIKDWILMDENYEFCFSLYKDSLILIQTKDMQEPELVYFNAFTSSTVSLIVSKHDNKFETLSKNLKVFEKYIVSALGEVTKAEFRQREDFKNELR

SEQ ID NO: 874 - protein, 984 aa, Campylobacter jejuni
MARILAFDIGISSIGWAFSENDELKDCGVRIFTKAENPKTGESLALPRRLARSARKRLARRKARLNHLKHLIANEFKLNYEDYQSFDESLAKAYKGSLISPYELRFRALNELLSKQDFARVILHIAKRRGYDDIKNNGDEEKGKILKAIKQNEEKLVNYQSVGEYLYKEYFQKFKENSKEFINVRNKKESYERCITQSFLKYELKLIFQKQREFGFSFSKKFEEEVLSVAFYKRALKDFSHLVGNCSFFTDEKRAPKNSPLAFMFVALTRIINILNNLKNTEGILYTKDDLNALLNEVLKNGTLTYKQTKKLLGLSDDYEFKGEKGTYFIEFKKYKEFIKALGEHNLSQDDLNEIAKDITLIKDEIKLKKALAKYDLNQNQIDSLSKLEFKDHLNISFKALKLITPLMLEGKKYDEACNELNLKVAINEDKKDFLPAFNETYYKDEVTNPVVLRAIKEYRKILNALLKKYGKVHKINIELAREVGKNHSQRAKIEKEQNENYKAKKDAEIECEKLGLKINSKNILKLRLFKEQKEFCAYSGEKIKISDLQDEKMLEIDHIYPYSRSFDDSYMNKVLVFTKQNQEKLNQTPFEAFGNDSAKWQKIEVLAKNLPTKKQKRILDKNYKDKEQKDFKDRNLNDTRYIARLVLNYTKDYLDFLPLSDDENTKLNDTQKGSKVHVEAKSGMLTSALRHTWGFSAKDRNNHLHHAIDAVIIAYANNSIVKAFSDFKKEQESNSAELYAKKISELDYKNKRKFFEPFSGFRQKVLDKIDEIFVSKPERKKPSGALHEETFRKEEEFYQSYGGKEGVLKALELGKIRKVNGKIVKNGDMFRVDIFKHKKTNKFYAVPIYTMDFALKVLPNKAVARSKKGEIKDWILMDENYEFCFSLYKDSLILIQTKDMQEPEFVYYNAFTSSTVSLIVSKHDNKFETLSKNQKILFKNANEKEVIAKSIGIQNLKVFEKYIVSALGEVTKAEFRQREDFKK

SEQ ID NO: 875 - protein, 987 aa, Campylobacter jejuni
MARILAFDIGISSIGWAFSENDELKDCGVRIFTKAENPKTGESLALPRRLARSARKRLARRKARLNHLKHLIANEFKLNYEDYQSFDESLAKAYKGSLISPYELRFRALNELLSKQDFARVILHIAKRRGYDDIKNNGDEEKGKILKAIKQNEEKLVSYQSVGEYLYKEYFQKFKENSKEFINVRNKKESYERCIAQSFLKDELKLIFQKQREFGFSFSKKFEEEVLSVAFYKRALKDFSHLVGNCSFLLMKKERQKNSPLAFMFVALTRIINLLNNLKNTEGILYTKDDLNTLLNEALKNGTLTYKQTKKLLGLSNDYEFKGEKGTYFIEFQKYKEFVKALGEHNLSQDDLNEIAKDITLIKDEIKLKKALAKYDLNQNQIDSLSKLEFKDHLNISFKALKLITPLMLEGKKYDEACNELNLKVAINEDKKDFLPAFNETYYKDEVTNPVVLRAIKEYRKVLNALLKKYGKVHKINIELAREVGKNHSQRAKIEKEQNENYKAKKDAELECEKLGLKINSKNILKLRLFKEQKEFCVYSGEKIKISDLQDEKMLEIDHIYPYSRSFDDSYMNKVLVFTKQNQEKLNKTPFETFGNDRVKWQKIEVLAKNLPTKKQKRILDKNYKDKEQKDFKDRNLNDTRYIARLVLNYTKDYLDFLPLSDDENTKLNDTQKGSKVHVEAKSGMLTSTLRHTWGFSTKDRNNHLHHAIDAAIIAYANNSIVKAFSDFKKEQESNTAELYAKKISELDYKNKRKFFEPFSGFRQKLLDKIDEIFVSKPERKKPSGALHEETFRKEEEFYQSYGGKEGVLKALELGKIRKVNGKMVKNGDMFRVDIFKHKKTNKFYAVPIYTMDFALKVLPNKAVVQGKDKKSGLIKDWILMDENYEFCFSLYKDSLILIQTKDMQEPELVYYERLDSSNASLTVSKHDNKFETLSKNQKILFKNANEKEVIAKSIGIQNLKVFEKYIVSALGEVTKAEFRQREDFKK

SEQ ID NO: 876 - protein, 987 aa, Campylobacter jejuni
MARILAFDIGISSIGWAFSENDELKDCGVRIFTKAENPKTGESLALPRRLARSARKRLARRKARLNHLKHLIANEFKLNYEDYQSFDESLAKAYKGSLISPYELRFRALNELLSKQDFARVILHIAKRRGYDDIKNNGDEEKSEILKAIKQNEEKLVNYQSVGEYLYKEYFQKFKENSKEFINVRNKKESYERCIAQSFLKDELKLIFQKQREFGFSFSKKFEEEVLSVAFYKRALKDFSHLVGNCSFFTDEKRAPKNSPLAFMFVALTRIINLLNNLKNTEGILYTKDDLNTLLNEVLKNGTLTYKQTKKLLGLSDDYEFKGEKGTYFIEFKKYKEFIKALGEHNLSQDNLNEIAKDITLIKDEIKLKKALAKYDLNQNQIDSLSKLEFKDHLNISFKALKLITPLMLEGKKYDEAYNELNLKVAINEDKKDFLPAFNETYYKDEVTNPVVLRAIKEYRKVLNALLKKYGKVHKINIELAREVGKNHSQRAKIEKEQNENYKAKKDAELECEKLGLKINSKNILKLRLFKEQKEFCAYSGEKIKISDLQDEKMLEIDHIYPYSRSFDDSYMNKVLVFTKQNQEKLNQTPFEAFGNDSAKWQKIEVLAKNLPTKKQKRILDKNYKDKEQKDFKDRNLNDTRYIARLVLNYTKDYLDFLPLSDDENTKLNDTQKGSKVHVEAKSGMLTSALRHTWGFSAKDRNNHLHHAIDAVIIAYANNSIVKAFSDFKKEQESNSAELYAKKISELDYKNKRKFFEPFSGFRQKVLDKIDEIFVSKPERKKPSGALHEETFRKEEEFYQSYGGKEGVLKALELGKIRKVNGKIVKNGDMFRVDIFKHKKTNKFYPVPIYTMDFALKVLPNKAVVQGKDKKSGLIKDWILMDENYEFCFSLYKDSLILIQTKDMQEPELVYFNAFTSSTVSLIVSKHDNKFETLSKNQKILFKNANEKEVIAKSIGIQNLKVFEKYIVSALGEVTKAEFRQREDFKK

SEQ ID NO: 877 - protein, 987 aa, Campylobacter jejuni
MARILAFDIGISSIGWAFSENDELKDCGVRIFTKAENPKTGESLALPRRLARSARKRLARRKARLNHLKHLIANEFKLNYEDYQSFDESLAKAYKGSLISPYELRFRALNELLSKQDFARVILHIAKRRGYDDIKNNGDEEKSEILKAIKQNEEKLVNYQSVGEYLYKEYFQKFKENSKEFINVRNKKESYERCIAQSFLKDELKLIFQKQREFGFSFSKKFEEEVLSVAFYKRALKDFSHLVGNCSFFTDEKRAPKNSPLAFMFVALTRIINLLNNLKNTEGILYTKDDLNTLLNEVLKNGTLTYKQTKKLLGLSDDYEFKGEKGTYFIEFKKYKEFIKALGEHNLSQDNLNEIAKDITLIKDEIKLKKALAKYDLNQNQIDSLSKLEFKDHLNISFKALKLITPLMLEGKKYDEAYNELNLKVAINEDKKDFLPAFNETYYKDEVTNPVVLRAIKEYRKVLNALLKKYGKVHKINIELAREVGKNHSQRAKIEKEQNENYKAKKDAELECEKLGLKINSKNILKLRLFKEQKEFCAYSGEKIKISDLQDEKMLEIDHIYPYSRSFDDSYMNKVLVFTKQNQEKLNQTPFEAFGNDSAKWQKIEVLAKNLPTKKQKRILDKNYKDKEQKDFKDRNLNDTRYIARLVLNYTKDYLDFLPLSDDENTKLNDTQKGSKVHVEAKSGMLTSALRHTWGFSAKDRNNHLHHAIDAVIIAYANNSIVKAFSDFKKEQESNSAELYAKKISELDYKNKRKFFEPFSGFRQKVLDKIDEIFVSKPERKKPSGALHEETFRKEEEFHQSYGGKEGVLKALELGKIRKVNGKIVKNGDMFRVDIFKHKKTNKFYAVPIYTMDFALKVLPNKAVVQGKDKKSGLIKDWILMDENYEFCFSLYKDSLILIQTKDMQEPELVYFNAFTSSTVSLIVSKHDNKFETLSKNQKILFKNANEKEVIAKSIGIQNLKVFEKYIVSALGEVTKAEFRQREDFKK

SEQ ID NO: 878 - protein, 987 aa, Campylobacter jejuni
MARILAFDIGISSIGWAFSENDELKDCGVRIFTKAENPKTGESLALPRRLARSARKRLARRKARLNHLKHLIANEFKLNYEDYQSFDESLAKAYKGSLISPYELRFRALNELLSKQDFARVILHIAKRRGYDDIKNNGDEEKSEILKAIKQNEEKLVNYQSVGEYLYKEYFQKFKENSKEFINVRNKKESYERCIAQSFLKDELKLIFQKQREFGFSFSKKFEEEVLSVAFYKRALKDFSHLVGNCSFFTDEKRAPKNSPLAFMFVALTRIINLLNNLKNTEGILYTKDDLNTLLNEVLKNGTLTYKQTKKLLGLSDDYEFKGEKGTYFIEFKKYKEFIKALGEHNLSQDNLNEIAKDITLIKDEIKLKKALAKYDLNQNQIDSLSKLEFKDHLNISFKALKLITPLMLEGKKYDEAYNELNLKVAINEDKKDFLPAFNETYYKDEVTNPVVLRAIKEYRKVLNALLKKYGKVHKINIELAREVGKNHSQRAKIEKEQNENYKAKKDAELECEKLGLKINSKNILKLRLFKEQKEFCAYSGEKIKISDLQDEKMLEIDHIYPYSRSFDDSYMNKVLVFTKQNQEKLNQTPFEAFGNDSAKWQKIEVLAKNLPTKKQKRILDKNYKDKEQKDFKDRNLNDTRYIARLVLNYTKDYLDFLPLSDDENTKLNDTQKGSKVHVEAKSGMLTSALRHTWGFSAKDRNNHLHHAIDAVIIAYANNSIVKAFSDFKKEQESNSAELYAKKISELDYKNKRKFFEPFSGFRQKVLDKIDEIFVSKPERKKPSGALHEETFRKEEEFYQSYGGKEGVLKALELGKIRKVNGKIVKNGDMFRVDIFKHKKTNKFYAVPIYTMDFALKVLPNKAVVQGKDKKSGLIKDWILMDENYEFCFSLYKDSLILIQTKDMQEPELVYFNAFTSSTVSLIVSKHDNKFETLSKNQKILFKNANEKEVIAKSIGIQNLKVFEKYIVSALGEVTKAEFRQREDFKK

SEQ ID NO: 879 - protein, 861 aa, Campylobacter jejuni
MARILAFDIGISSIGWAFSENDELKDCGVRIFTKAENPKTGESLALPRRLARSARKRLARRKARLNHLKHLIANEFKLNYEDYQSFDESLAKAYKGSLISPYELRFRALNELLSKQDFARVILHIAKRRGYDDIKNNGDEEKSEILKAIKQNEEKLVNYQSVGEYLYKEYFQKFKENSKEFINVRNKKESYERCITQSFLKDELKLIFQKQREFGFSFSKKFEEEVLSVAFYKRALKDFSHLVGNCSFFTDEKRAPKNSPLAFMFVALTRIINILNNLKNTEGILYTKDDLNALLNEVLKNGTLTYKQTKKLLGLSDDYEFKGEKGTYFIEFKKYKEFIKALGEHNLSQDDLNEIAKDITLIKDEIKLKKALAKYDLNQNQIDSLSKLEFKDHLNISFKALKLITPLMLEGKKYDEACNELNLKVAINEDKKDFLPAFNETYYKDEVTNPVVLRAIKEYRKILNALLKKYGKVHKINIELAREVGKNHSQRAKIEKEQNENYKAKKDAEIECEKLGLKINSKNILKLRLFKEQKEFCAYSGEKIKLSDLQDEKMLEIDHIYPYSRSFDDSYMNKVLVFTKQNQEKLNKTPFEAFGNDSTKWQKIEVLAKNLPEKKQKRILDKNYKDKEQKDFKDRNLNDTRYIARLVLNYTKDYLDFLPLSDDENTKLNDTQKGSKVHVEAKSGMLTSALRHTWGFSAKDRNNHLHHAIDAAIIAYANNSIVKAFSDFKKEQESNSVELYAKKISELDYKNKRKFFEPFSGFRQKVLDKIDEIFVSKPERKKPSGALHEETFRKEEEFYQSYGGKEGVLKALELGKIRKVNGKIVKNGDMFRVDIFKHKKTNKFLCCANLYYGFCFKSITK

SEQ ID NO: 880 - protein, 462 aa, Campylobacter jejuni
MARILAFDIGISSIGWAFSENDELKDCGVRIFTKAENPKTGESLALPRRLARSARKRLARRKARLNHLKHLIANEFKLNYEDYQSFDESLAKAYKGSLISPYELRFRALNELLSKQDFARVILHIAKRRGYDDIKNNGDEEKSEILKAIKQNEEKLVNYQSVGEYLYKEYFQKFKENSKEFINVRNKKESYERCITQSFLKDELKLIFQKQREFGFSFSKKFEEEVLSVAFYKRALKDFSHLVGNCSFFTDEKRAPKNSPLAFMFVALTRIINILNNLKNTEGILYTKDDLNALLNEVLKNGTLTYKQTKKLLGLSDDYEFKGEKGTYFIEFKKYKEFIKALGEHNLSQDDLNEIAKDITLIKDEIKLKKALAKYDLNQNQIDSLSKLEFKDHLNISFKALKLITPLMLEGKKYDEACNELNLKVAINEDKKDFLPAFNETYYKDEVTNPVVLRAIKEYRKS

SEQ ID NO: 881 - protein, 984 aa, Campylobacter jejuni
MARILAFDIGISSIGWAFSENDELKDCGVRIFTKAENPKTGESLALPRRLARSARKRLARRKARLNHLKHLIANEFKLNYEDYQSFDESLAKAYKGSLISPYELRFRALNELLSKQDFARVILHIAKRRGYDDIKNNGDEEKSEILKAIKQNEEKLVNYQSVGEYLYKEYFQKFKENSKEFINVRNKKESYERCITQSFLKDELKLIFQKQREFGFSFSKKFEEEVLSVAFYKRALKDFSHLVGNCSFFTDEKRAPKNSPLAFMFVALTRIINLLNNLKNTEGILYTKDDLNALLNEVLKNGTLTYKQTKKLLGLSDDYEFKGEKGTYFIEFKKYKEFIKALDEHSLSQDDLNEIAKDITLIKDEIKLKKALAKYDLNQNQIDSLSKLEFKDHLNISFKALKLITPLMLEGKKYDEACNELNLKVAINEDKKDFLPAFNETYYKDEVTNPVVLRAIKEYRKILNALLKKYGKVHKINIELAREVGKNHSQRAKIEKEQNENYKAKKDAEIECEKLGLKINSKNILKLRLFKEQKEFCAYSGEKIKISDLQDEKMLEIDHIYPYSRSFDDSYMNKVLVFTKQNQEKLNKTPFEAFGNDGVKWQKIEVLAKNLPEKKQKRILDKNYKDKEQKDFKDRNLNDTRYIARLVLNYTKDYLDFLPLSDDENTKLNDTQKGSKVHVEAKSGMLTSALRHTWGFSTKDRNNHLHHAIDAAIIAYANNSIVKAFSDFKKEQESNSAELYAKKISELDYKNKRKFFEPFSGFRQKVLDKIDEIFVSKPERKKPSGALHEETFRKEEEFYQSYGGKEGVLKALELGKIRKVNGKIVKNGDMFRVDIFKHKKTNKFYAVPIYTMDFALKVLPNKAVARSKKGEIKDWILMDENYEFCFSLYKDSLILIQTKDMQEPELVYFNAFTSSTVSLVVSKHDNKFETLSKNQKILFKNANEKEVIAKSIGIQNLKVFEKYIVSALGEVTKAEFRQREDFKK

SEQ ID NO: 882 - protein, 984 aa, Campylobacter jejuni
MARILAFDIGISSIGWAFSENDELKDCGVRIFTKAENPKTGESLALPRRLARSARKRLARRKARLNHLKHLIANEFKLNYEDYQSFDESLAKAYKGSLISPYELRFRALNELLSKQDFARVILHIAKRRGYDDIKNSDDKEKGAILKAIKQNEEKLANYQSVGEYLYKEYFQKFKENSKEFTNVRNKKESYERCIAQSFLKDELKLIFKKQREFGFSFSKKFEEEVLSVAFYKRALKDFSHLVGNCSFFTDEKRAPKNSPLAFMFVALTRIINLLNNLKNTEGILYTKDDLNALLNEVLKNGTLTYKQTKKLLGLSDDYEFKGEKGTYFIEFKKYKEFIKALGDHSLSQDDLNEIAKDITLIKDEIKLKKALAKYDLNQNQIDSLSKLEFKDHLNISFKALKLITPLMLEGKKYDEACNELNLKVAINEDKKDFLPAFNETYYKDEVTNPVVLRAIKEYRKVLNALLKKYGKVHKINIELAREVGKNYSQRAKIEKEQNENYKAKKDAELECEKLGLKINSKNILKLRLFKEQKEFCAYSGEKIKISDLQDEKMLEIDHIYPYSRSFDDSYMNKVLVFTKQNQEKLNQTPFEAFGNDSAKWQKIEVLAKNLPTKKQKRILDKNYKDKEQKDFKDRNLNDTRYIARLVLNYTKDYLDFLPLSDDENTKLNDTQKGSKVHVEAKSGMLTSALRHTWGFSAKDRNNHLHHAIDAVIIAYANNSIVKAFSDFKKEQESNSAELYAKKISELDYKNKRKFFEPFSGFRQKVLDKIDEIFVSKPERKKPSGALHEETFRKEEEFYQSYGGKEGVLKALELGKIRKVNGKIVKNGDMFRVDIFKHKKTNKFYAVPIYTMDFALKVLPNKAVARSKKGEIKDWILMDENYEFCFSLYKDSLILIQTKDMQEPEFVYYNAFTSSTVSLIVSKHDNKFETLSKNQKILFKNANEKEVIAKSIGIQNLKVFEKYIVSALGEVTKAEFRQREDFKK

SEQ ID NO: 883 - protein, 984 aa, Campylobacter jejuni
MARILAFDIGISSIGWAFSENDELKDCGVRIFTKAENPKTGESLALPRRLARSARKRLARRKARLNHLKHLIANEFKLNYEDYQSFDESLAKAYKGSLISPYELRFRALNELLSKQDFARVILHIAKRRGYDDIKNSDDKEKGAILKAIKQNEEKLANYQSVGEYLYKEYFQKFKENSKEFTNVRNKKESYERCIAQSFLKDELKLIFKKQREFGFSFSKKFEEEVLSVAFYKRALKDFSHLVGNCSFFTDEKRAPKNSPLAFMFVALTRIINLLNNLKNTEGILYTKDDLNTLLNEVLKNGTLTYKQTKKLLGLSDDYEFKGEKGTYFIEFKKYKEFIKALGEHNLSQDDLNEIAKDITLIKDEIKLKKALAKYDLNQNQIDSLSKLEFKDHLNISFKALKLITPLMLEGKKYDEACNELNLKVAINEDKKDFLPAFNETYYKDEVTNPVVLRAIKEYRKVLNALLKKYGKVHKINIELAREVGKNYSQRAKIEKEQNENYKAKKDAELECEKLGLKINSKNILKLRLFKEQKEFCAYSGEKIKISDLQDEKMLEIDHIYPYSRSFDDSYMNKVLVFTKQNQEKLNKTPFEAFGNDSTKWQKIEVLAKNLPEKKQKRILDKNYKDKEQKDFKDRNLNDTRYIARLVLNYTKDYLDFLPLSDDENTKLNDTQKGLKVHVEAKSGMLTSALRHTWGFSAKDRNNHLHHAIDAVIIAYANNSIVKAFSDFKKEQESNSAELYAKKISELDYKNKRKFFEPFSGFRQKVLDKIDEIFVSKPERKKPSGALHEETFRKEEEFYQSYGGKEGVLKALELGKIRKVNGKIVKNGDMFRVDIFKHKKTNKFYAVPIYTMDFALKVLPNKAVARSKKGEIKDWILMDENYEFCFSLYKDSLILIQTKDMQEPEFVYYNAFTSSTVSLIVSKHDNKFETLSKNQKILFKNANEKEVIAKSIGIQNLKVFEKYIVSALGEVTKAEFRQREDFKK

SEQ ID NO: 884 - protein, 984 aa, Campylobacter jejuni
MARILAFDIGISSIGWAFSENDELKDCGVRIFTKAENPKTGESLALPRRLARSARKRLARRKARLNHLKHLIANEFKLNYEDYQSFDESLAKAYKGSLISPYELRFRALNELLSKQDFARVILHIAKRRGYDDIKNSDDKEKGAILKAIKQNEEKLANYQSVGEYLYKEYFQKFKENSKEFTNVRNKKESYERCIAQSFLKDELKLIFKKQREFGFSFSKKFEEEVLSVAFYKRALKDFSHLVGNCSFFTDEKRAPKNSPLAFMFVALTRIINLLNNLKNTEGILYTKDDLNALLNEVLKNGTLTYKQTKKLLGLSDDYEFKGEKGTYFIEFKKYKEFIKALGDHSLSQDDLNEIAKDITLIKDEIKLKKALAKYDLNQNQIDSLSKLEFKDHLNISFKALKLITPLMLEGKKYDEACNELNLKVAINEDKKDFLPAFNETYYKDEVTNPVVLRAIKEYRKVLNALLKKYGKVHKINIELAREVGKNYSQRAKIEKEQNENYKAKKDAELECEKLGLKINSKNILKLRLFKEQKEFCAYSGEKIKISDLQDEKMLEIDHIYPYSRSFDDSYMNKVLVFTKQNQEKLNQTPFEAFGNDSAKWQKIEVLAKNLPTKKQKRILDKNYKDKEQKNFKDRNLNDTRYIARLVLNYTKDYLDFLPLSDDENTKLNDTQKGSKVHVEAKSGMLTSALRHTWGFSAKDRNNHLHHTIDAVIIAYANNSIVKAFSDFKKEQESNSAELYAKKISELDYKNKRKFFEPFSGFRQKVLDKIDEIFVSKPERKKPSGALHEETFRKEEEFYQSYGGKEGVLKALELGKIRKVNGKIVKNGDMFRVDIFKHKKTNKFYAVPIYTMDFALKVLPNKAVARSKKGEIKDWILMDENYEFCFSLYKDSLILIQTKDMQEPEFVYYNAFTSSTVSLIVSKHDNKFETLSKNQKILFKNANEKEVIAKSIGIQNLKVFEKYIVSALGEVTKAEFRQREDFKK

SEQ ID NO: 885 - protein, 984 aa, Campylobacter jejuni
MARILAFDIGISSIGWAFSENDELKDCGVRIFTKAENPKTGESLALPRRLARSARKRLARRKARLNHLKHLIANEFKLNYEDYQSFDESLAKAYKGSLISPYELRFRALNELLSKQDFARVILHIAKRRGYDDIKNSDDKEKGAILKAIKQNEEKLANYQSVGEYLYKEYFQKFKENSKEFTNVRNKKESYERCIAQSFLKDELKLIFKKQREFGFSFSKKFEEEVLSVAFYKRALKDFSHLVGNCSFFTDEKRAPKNSPLAFMFVALTRIINLLNNLKNTEGILYTKDDLNTFLNEVLKNGTLTYKQTKKLLGLSDDYEFKGEKGTYFIEFKKYKEFIKALGDHNLSQDDLNEIAKDITLIKDEIKLKKALAKYDLNQNQIDSLSKLEFKDHLNISFKALKLITPLMLEGKKYDEACNELNLKVAINEDKKDFLPAFNETYYKDEVTNPVVLRAIKEYRKVLNALLKKYGKVHKINIELAREVGKNHSQRAKIEKEQNENYKAKKDAELECEKLGLKINSKNILKLRLFKEQKEFCAYSGEKIKISDLQDEKMLEIDHIYPYSRSFDDSYMNKVLVFTKQNQEKLNKTPFEAFGNDSAKWQKIEVLAKNLPTKKQKRILDKNYKDKEQKDFKDRNLNDTRYIARLVLNYTKDYLDFLPLSDDENTKLNDTQKGSKVHVEAKSGMLTSALRHTWGFSTKDRNNHLHHAIDAVIIAYANNSIVKAFSDFKKEQESNSAELYAKKISELDYKNKRKFFEPFSGFRQKVLDKIDEIFVSKPERKKPSGALHEETFRKEEEFYQSYGGKEGVLKALELGKIRKVNGKIVKNGDMFRVDIFKHKKTNKFYAVPIYTMDFALKVLPNKAVARSKKGEIKDWILMDENYEFCFSLYKDSLILIQTKDMQEPEFVYYNAFTSSTVSLIVSKHDNKFETLSKNQKILFKNANEKEVIAKSIGIQNLKVFEKYIVSALGEVTKAEFRQREDFKK

SEQ ID NO: 886 - protein, 987 aa, Campylobacter jejuni
MARILAFDIGISSIGWAFSENDELKDCGVRIFTKAENPKTGESLALPRRLARSARKRLARRKARLNHLKHLIANEFKLNYEDYQSFDESLAKAYKGSLISPYELRFRALNELLSKQDFARVILHIAKRRGYDDIKNSDDKEKGAILKAIKQNEEKLANYQSVGEYLYKEYFQKFKENSKEFTNVRNKKESYERCIAQSFLKDELKLIFKKQREFGFSFSKKFEEEVLSVAFYKRALKDFSHLVGNCSFFTDEKRAPKNSPLAFMFVALTRIINLLNNLKNTEGILYTKDDLNTLLNEVLKNGTLTYKQTKKLLGLSDDYEFKGEKGTYFIEFKKYKEFIKSLGDHSLSQDDLNEIAKDITLIKDEIKLKKALAKYDLNQNQIDSLSKLEFKDHLNISFKALKLITPLMLEGKKYDEACNELNLKVAINEDKKDFLPAFNETYYKDEVTNPVVLRAIKEYRKVLNALLKKYGKVHKINIELAREVGKNHSQRAKIEKEQNENYKAKKDAELECEKLGLKINSKNILKLRLFKEQKEFCAYSGEKIKISDLQDEKMLEIDHIYPYSRSFDDSYMNKVLVFTKQNQEKLNQTPFEAFGNDSAKWQKIEVLAKNLPTKKQKRILDKNYKDKEQKNFKDRNLNDTRYIARLVLNYTKDYLDFLPLSDDENTKLNDTQKGSKVHVEAKSGMLTSALRHTWGFSAKDRNNHLHHAIDAVIIAYANNSIVKAFSDFKKEQESNSAELYAKKISELDYKNKRKFFEPFSGFRQKVLDKIDEIFVSKPERKKPSGALHEETFRKEEEFYQSYGGKEGVLKALELGKIRKVNGKIVKNGDMFRVDIFKHKKTNKFYAVPIYTMDFALKVLPNKAVARSKKGEIKDWILMDENYEFCFSLYKDSLILIQTKDMQEPEFVYYNAFTSSTVSLIVSKHDNKFETLSKNQKILFKNANEKEVIAKSIGIQNLKVFEKYIVSALGEVTKAEFRQREDFKNELR

SEQ ID NO: 887 - protein, 987 aa, Campylobacter jejuni
MARILAFDIGISSIGWAFSENDELKDCGVRIFTKAENPKTGESLALPRRLARSARKRLARRKARLNHLKHLIANEFKLNYEDYQSFDESLAKAYKGSLISPYELRFRALNELLSKQDFARVILHIAKRRGYDDIKNSDDKEKGAILKAIKQNEEKLANYQSVGEYLYKEYFQKFKENSKEFTNVRNKKESYERCIAQSFLKDELKLIFKKQREFGFSFSKKFEEEVLSVAFYKRALKDFSHLVGNCSFFTDEKRAPKNSPLAFMFVALTRIINLLNNLKNTEGILYTKDDLNALLNEVLKNGTLTYKQTKKLLGLSDDYEFKGEKGTYFIEFKKYKEFIKALGDHSLSQDDLNEIAKDITLIKDEIKLKKALVKYDLNQNQIDSLSKLEFKDHLNISFKALKLITPLMLEGKKYDEACNELNLKVAINEDKKDFLPAFNETYYKDEVTNPVVLRAIKEYRKVLNALLKKYGKVHKINIELAREVGKNYSQRAKIEKEQNENYKAKKDAELECEKLGLKINSKNILKLRLFKEQKEFCAYSGEKIKISDLQDEKMLEIDHIYPYSRSFDDSYMNKVLVFTKQNQEKLNQTPFEAFGNDSAKWQKIEVLAKNLPTKKQKRILDKNYKDKEQKDFKDRNLNDTRYIARLVLNYTKDYLDFLPLSDDENTKLNDTQKGSKVHVEAKSGMLTSALRHTWGFSAKDRNNHLHHAIDAVIIAYANNSIVKAFSDFKKEQESNSAELYAKKISELDYKNKRKFFEPFSGFRQKVLDKIDEIFVSKPERKKPSGALHEETFRKEEEFYQSYGGKEGVLKALELGKIRKVNGKIVKNGDMFRVDIFKHKKTNKFYAVPIYTMDFALKVLPNKAVARSKKGEIKDWILMDENYEFCFSLYKDSLILIQTKDMQEPELVYFNAFTSSTVSLIVSKHDNKFETLSKNQKILFKNANEKEVIAKSIGIQNLKVFEKYIVSALGEVTKAEFRQREDFKNELR

SEQ ID NO: 888 - protein, 983 aa, Campylobacter jejuni; identical to SEQ ID NO: 231

SEQ ID NO: 889 - protein, 987 aa, Campylobacter jejuni
MARILAFDIGISSIGWAFSENDELKDCGVRIFTKAENPKTGESLALPRRLARSARKRLARRKARLNHLKHLIANEFKLNYEDYQSFDESLAKAYKGSLISPYELRFRALNELLSKQDFARVILHIAKRRGYDDIKNSDDKEKGAILKAIKQNEEKLVNYQSVGEYLYKEYFQKFKENSKEFTNVRNKKESYERCIAQSFLKDELKLIFKKQREFGFSFSKKFEEEVLSVAFYKRALKDFSHLVGNCSFFTDEKRAPKNSPLAFMFVALTRIINLLNNLKNTEGILYTKDDLNALLNEVLKNGTLTYKQTKKLLGLSDDYEFKGEKGTYFIEFKKYKEFIKALGDHSLSQDDLNEIAKDITLIKDEIKLKKALAKYDLNQNQIDSLSKLEFKDHLNISFKALKLITPLMLEGKKYDEACNELNLKVAINEDKKDFLPAFNETYYKDEVTNPVVLRAIKEYRKVLNALLKKYGKVHKINIELAREVGKNYSQRAKIEKEQNENYKAKKDAELECEKLGLKINSKNILKLRLFKEQKEFCAYSGEKIKISDLQDEKMLEIDHIYPYSRSFDDSYMNKVLVFTKQNQEKLNQTPFEAFGNDSAKWQKIEVLAKNLPTKKQKRILDKNYKDKEQKDFKDRNLNDTRYIARLVLNYTKDYLDFLPLSDDENTKLNDTQKGSKVHVEAKSGMLTSALRHTWGFSAKDRNNHLHHAIDAVIIAYANNSIVKAFSDFKKEQESNSAELYAKKISELDYKNKRKFFEPFSGFRQKVLDKIDEIFVSKPERKKPSGALHEETFRKEEEFYQSYGGKEGVLKALELGKIRKVNGKIVKNGDMFRVDIFKHKKTNKFYAVPIYTMDFALKVLPNKAVARSEKGEIKDWILMDENYEFCFSLYKDSLILIQTKDMQEPELVYFNAFTSSTVSLIVSKHDNKFETLSKNQKILFKNANEKEVIAKSIGIQNLKVFEKYIVSALGEVTKAEFRQREDFKNELR

SEQ ID NO: 890 - protein, 987 aa, Campylobacter jejuni
MARILAFDIGISSIGWAFSENDELKDCGVRIFTKAENPKTGESLALPRRLARSARKRLARRKARLNHLKHLIANEFKLNYEDYQSFDESLAKAYKGSLISPYELRFRALNELLSKQDFARVILHIAKRRGYDNIKNSDNEEKSEILKAIKQNEEKLVNYQSVGEYLYKEYFQKFKENSKEFINVRNKKESYERCIAQSFLKDELKLIFQKQREFGLSFSKKFEEEVLSVAFYKRALKDFSHLVGNCSFFTDEKRAPKNSPLAFMFVALTRIINLLNNLKNTEGILYTKDDLNTLLNEVLKNGTLTYKQTKKLLGLSDDYEFKGEKGTYFIEFKKYKEFIKALGDHSLSQDDLNEIAKDITLIKDEIKLKKALAKYDLNQNQIDSLSKLEFKDHLNISFKALKLITPLMLEGKKYDEACNELNLKVVINEDKKDFLPAFNETYYKDEVTNPVVLRAIKEYRKVLNALLKKYGKVHKINIELAREVGKNHSQRAKIEKEQNENYKAKKDAELECEKLGLKINNKNILKLRLFKEQKEFCAYSGEKIKLSDLQDEKMLEIDHIYPYSRSFDDSYMNKVLVFTKQNQEKLNKTPFEAFGNDSTKWQKIEVLAKNLPTKKQKRILDKNYKDKEQKDFKDRNLNDTRYIARLVLNYTKDYLDFLPLSDDENTKLNDIQKGSKVHVEAKSGMLTSALRHTWGFSTKDRNNHLHHAIDAVIIAYANNSIVKAFSDFKKEQESNSAELYAKKISELDYKNKRKFFEPFSGFRQKVLDKIDEIFVSKPERKKPSGALHEETFRKEEEFYQSYGGKEGVLKALELGKIRKVNGKIVKNGDMFRVDIFKHKKTNKFYAVPIYTMDFALKVLPNKAVVQGKDKKSGLIKDWILMDENYEFCFSLYKDSLILIQTKDMQEPEFVYYNAFTSSTVSLIVSKHDNKFETLSKNQKILFKNANEKEVIAKSIGIQNLKVFEKYIVSALGEVTKAEFRQREDFKK

SEQ ID NO: 891 - protein, 984 aa, Campylobacter jejuni
MARILAFDIGISSIGWAFSENDELKDCGVRIFTKAENPKTGESLALPRRLARSARKRLARRKARLNHLKHLIANEFKLNYEDYQSFDESLAKAYKGSLISPYELRFRALNELLSKQDFARVILHIVKRRGYDDIKNSDDKEKGAILKAIKQNEEKLANYQSVGEYLYKEYFQKFKENSKEFTNVRNKKESYERCIAQSFLKDELKLIFKKQREFGFSFSKKFEEEVLSVAFYKRALKDFSHLVGNCSFFTDEKRAPKNSPLAFMFVALTRIINLLNNLKNTEGILYTKDDLNTLLNEVLKNGTLTYKQTKKLLGLSDDYEFKGEKGTYFIEFKKYKEFIKALGDHSLSQDDLNEIAKDITLIKDEIKLKKALAKYDLNQNQIDSLSKLEFKDHLNISFKALKLITPLMLEGKKYDEACNELNLKVAINEDKKDFLPAFNETYYKDEVTNPVVLRAIKEYRKVLNALLKKYGKVHKINIELAREVGKNHSQRAKIEKEQNENYKAKKDAEFECEKLGLKINSKNILKLRLFKEQKEFCAYSGEKIKISDLQDEKMLEIDHIYPYSRSFDDSYMNKVLVFTKQNQEKLNKTPFEAFGNDSAKWQKIEVLAKNLPTKKQKRILDKNYKDKEQKDFKDRNLNDTRYIARLVLNYTKDYLDFLPLSDDENTKLNDTQKGSKVHVEAKSGMLTSALRHTWGFSTKDRNNHLHHAIDAVIIAYANNSIVKAFSDFKKEQESNSAELYAKKISELDYKNKRKFFEPFSGFRQKVLDKIDEIFVSKPERKKPSGALHEETFRKEEEFYQSYGGKEGVLKALELGKIRKVNGKIVKNGDMFRVDIFKHKKTNKFYAVPIYTMDFALKVLPNKAVARSKKGEIKDWILMDENYEFCFSLYKDSLILIQTKDMQEPEFVYYNAFTSSTVSLIVSKHDNKFETLSKNQKILFKNANEKEVIAKSIGIQNLKVFEKYIVSALGEVTKAEFRQREDFKK

SEQ ID NO: 892 - protein, 984 aa, Campylobacter jejuni
MARILAFDIGISSIGWAFSENDELKDCGVRIFTKAENPKTGESLALPRRLARSARKRLARRKARLNHLKHLIANEFKLNYEDYQSFDESLAKAYKGSLISPYELRFRALNELLSKQDFARVILHIVKRRGYDDIKNSDDKEKGTILKAIKQNEEKLANYQSVGEYLYKEYFQKFKENSKEFTNVRNKKESYERCIAQSFLKDELKLIFKKQREFGFSFSKKFEEEVLSVAFYKRALKDFSHLVGNCSFFTDEKRAPKNSPLAFMFVALTRIINLLNNLKNTEGILYTKDDLNTLLNEVLKNGTLTYKQTKKLLGLSDDYEFKGEKGTYFIEFKKYKEFIKALGEHNLSQDDLNEIAKDITLIKDEIKLKKALAKYDLNQNQIDSLSKLEFKDHLNISFKALKLITPLMLEGKKYDEACNELNLKVAINEDKKDFLPAFNETYYKDEVTNPVVLRAIKEYRKVLNALLKKYGKVHKINIELAREVGKNYSQRAKIEKEQNENYKAKKDAELECEKLGLKINSKNILKLRLFKEQKEFCAYSGEKIKISDLQDEKMLEIDHIYPYSRSFDDSYMNKVLVFTKQNQEKLNQTPFEAFGNDSAKWQKIEVLAKNLPTKKQKRILDKNYKDKEQKDFKDRNLNDTRYIARLVLNYTKDYLDFLPLSDDENTKLNDTQKGSKVHVEAKSGMLTSALRHTWGFSAKDRNNHLHHAIDAVIIAYANNSIVKAFSDFKKEQESNSAELYAKKISELDYKNKRKFFEPFSGFRQKVLDKIDEIFVSKPERKKPSGALHEETFRKEEEFYQSYGGKEGVLKALELGKIRKVNGKIVKNGDMFRVDIFKHKKTNKFYAVPIYTMDFALKVLPNKAVARSKKGEIKDWILMDENYEFCFSLYKDSLILIQTKDMQEPEFVYYNAFTSSTVSLIVSKHDNKFETLSKNQKILFKNANEKEVIAKSIGIQNLKVFEKYIVSALGEVTKAEFRQREDFKK

SEQ ID NO: 893 - protein, 987 aa, Campylobacter jejuni
MARILAFDIGISSIGWAFSENDELKDCGVRIFTKAENPKTGESLALPRRLARSARKRLARRKARLNHLKHLIANEFKLNYEDYQSFNESLAKAYKGSLISPYELRFRALNELLSKQDFARVILHIAKRRGYDDIKNSDDKEKGAILKVIKQNEEKLANYQSVGEYLYKEYFQKFKENSKEFTNVRNKKESYERCIAQSFLKDELKLIFQKQREFGFSFSKKFEEEVLSVAFYKRALKDFSHLVGNCSFFTDEKRAPKNSPLAFMFVALTRIINLLNNLKNTEGILYTKDDLNALLNEVLKNGTLTYKQTKKLLGLSDDYEFKGEKGTYFIEFKKYKEFIKALGDHSLSQDDLNEIAKDITLIKDEIKLKKALAKYDLNQNQIDSLSKLEFKDHLNISFKALKLITPLMLEGKKYDEACNELNLKVAINEDKKDFLPAFNETYYKDEVTNPVVLRAIKEYRKVLNALLKKYGKVHKINIELAREVGKNYSQRAKIEKEQNENYKAKKDAELECEKLGLKINSKNILKLRLFKEQKEFCAYSGEKIKISDLQDEKMLEIDHIYPYSRSFDDSYMNKVLVFTKQNQEKLNQTPFEAFGNDSAKWQKIEVLAKNLPTKKQKRILDKNYKDKEQKDFKDRNLNDTRYIARLVLNYTKDYLDFLPLSDDENTKLNDTQKGSKVHVEAKSGMLTSALRHTWGFSAKDRNNHLHHAIDAVIIAYANNSIVKAFSDFKKEQESNSAELYAKKISELDYKNKRKFFEPFSGFRQKVLDKIDEIFVSKPERKKPSGALHEETFRKEEEFYQSYGGKEGVLKALELGKIRKVNGKIVKNGDMFRVDIFKHKKTNKFYAVPIYTMDFALKVLPNKAVARSKKGEIKDWILMDENYEFCFSLYKDSLILIQTKDMQEPELVYFNAFTSSTVSLIVSKHDNKFETLSKNQKILFKNANEKEVIAKSIGIQNLKVFEKYIVSALGEVTKAEFRQREDFKNELR

SEQ ID NO: 894 - protein, 984 aa, Campylobacter jejuni
MARILAFDIGISSIGWAFSENDELKDCGVRIFTKAENPKTGESLALPRRLARSARKRLARRKARLNRLKHLIANEFKLNYEDYQSFDESLAKAYKGSLISPYELRFRALNELLSKQDFARVILHIAKRRGYDDIKNSDDKEKGAILKAIKQNEEKLANYQSVGEYLYKEYFQKFKENSKEFTNVRNKKESYERCIAQSFLKDELKLIFKKQREFGFSFSKKFEEEVLSVAFYKRALKDFSHLVGNCSFFTDEKRAPKNSPLAFMFVALTRIINLLNNLKNTEGILYTKDDLNALLNEVLKNGTLTYKQTKKLLGLSDDYEFKGEKGTYFIEFKKYKEFIKALGDHSLNQDDLNEIAKDITLIKDEIKLKKALAKYDLNQNQIDSLSKLEFKDHLNISFKALKLITPLMLEGKKYDEACNELNLKVAINEDKKDFLPAFNETYYKDEVTNPVVLRAIKEYRKVLNALLKKYGKVHKINIELAREVGKNYSQRAKIEKEQNENYKAKKDAELECEKLGLKINSKNILKLRLFKEQKEFCVYSGEKIKISDLQDEKMLEIDHIYPYSRSFDDSYMNKVLVFTKQNQEKLNQTPFEAFGNDSAKWQKIEVLAKNLPTKKQKRILDKNYKDKEQKDFKDRNLNDTRYIARLVLNYTKDYLDFLPLSDDENTKLNDTQKGSKVYVEAKSGMLTSALRHTWGFSTKDRNNHLHHAIDAVIIAYANNSIVKAFSDFKKEQESNSAELYAKKISELDYKNKRKFFEPFSGFRQKVLDKIDEIFVSKPERKKPSGALHEETFRKEEEFYQSYGGKEGVLKALELGKIRKVNGKIVKNGDMFRVDIFKHKKTNKFYAVPIYTMDFALKVLPNKAVARSKKGEIKDWILMDENYEFCFSLYKDSLILIQTKDMQEPEFVYYNAFTSSTVSLIVSKHDNKFETLSKNQKILFKNANEKEVIAKSIGIQNLKVFEKYIVSALGEVTKAEFRQREDFKK

SEQ ID NO: 895 - protein, 984 aa, Campylobacter jejuni
MARILAFDIGISSIGWAFSENDELKDCGVRIFTKVENPKTGESLALPRRLARSARKRLARRKARLNHLKHLIANEFKLNYEDYQSFDESLAKAYKGSLISPYELRFRALNELLSKQDFARVILHIAKRRGYDDIKNSDDKEKGAILKAIKQNEEKLANYQSVGEYLYKEYFQKFKENSKEFTNVRNKKESYERCIAQSFLKDELKLIFKKQREFGFSFLKKFEEEVLSVAFYKRALKDFSHLVGNCSFFTDEKRAPKNSPLAFMFVALTRIINLLNNLKNTEGILYTKDDLNALLNEVLKNGTLTYKQTKKLLGLSDDYEFKGEKGTYFIEFKKYKEFIKALGEHNLSQDDLNEIAKDITLIKDEIKLKKALAKYDLNQNQIDSLSKLEFKDHLNISFKALKLITPLMLEGKKYDEAYNELNLKVAINEDKKDFLPAFNETYYKDEVTNPVVLRAIKEYRKVLNALLKKYGKVHKINIELAREVGKNHSQRAKIEKEQNENYKAKKDAELECEKLGLKINSKNILKLRLFKEQKEFCAYSGEKIKISDLQDEKMLEIDHIYPYSRSFDDSYMNKVLVFTKQNQEKLNQTPFEAFGNDSAKWQKIEVLAKNLPTKKQKRILDKNYKDKEQKDFKDRNLNDTRYIARLVLNYTKDYLDFLPLSDDENTKLNDTQKGSKVHVEAKSGMLTSALRHTWGFSAKDRNNHLHHAIDAVIIAYANNSIVKAFSDFKKEQESNSAELYAKKISELDYKNKRKFFEPFSGFRQKVLDKIDEIFVSKPERKKPSGALHEETFRKEEEFYQSYGGKEGVLKALELGKIRKVNGKIVKNGDMFRVDIFKHKKTNKFYAVPIYTMDFALKVLPNKAVARSKKGEIKDWILMDENYEFCFSLYKDSLILIQTKDMQEPELVYFNAFTSSTVSLIVSKHDNKFETLSKNQKILFKNANEKEVIAKSIGIQNLKVFEKYIVSALGEVTKAEFRQREDFKK

SEQ ID NO: 896 - protein, 984 aa, Campylobacter jejuni
MARILAFDIGISSIGWAFSENDELKDCGVRIFTKVENPKTGESLALPRRLARSARKRLARRKARLNHLKHLIANEFKLNYEDYQSFDESLAKAYKGSLISPYELRFRALNELLSKQDFARVILHIAKRRGYDDIKNSDDKEKGAILKAIKQNEEKLANYQSVGEYLYKEYFQKFKENSKEFTNVRNKKESYERCIAQSFLKDELKLIFKKQREFGFSFSKKFEEEVLSVAFYKRALKDFSHLVGNCSFFTDEKRAPKNSPLAFMFVALTRIINLLNNLKNTEGILYTKDDLNALLNEVLKNGTLTYKQTKKLLGLSDDYEFKGEKGTYFIEFKKYKEFIKALGEHNLSQDDLNEIAKDITLIKDEIKLKKALAKYDLNQNQIDSLSKLEFKDHLNISFKALKLITPLMLEGKKYDEACNELNLKVAINEDKKDFLPAFNETYYKDEVTNPVVLRAIKEYRKVLNALLKKYGKVHKINIELAREVGKNHSQRAKIEKEQNENYKAKKDAELECEKLGLKINSKNILKLRLFKEQKEFCAYSGEKIKISDLQDEKMLEIDHIYPYSRSFDDSYMNKVLVFTKQNQEKLNKTPFEAFGNDSAKWQKIEVLAKNLPTKKQKRILDKNYKDKEQKDFKDRNLNDTRYIARLVLNYTKDYLDFLPLSNDENTKLNDTQKGSKVHVEAKSGMLTSALRHTWGFSTKDRNNHLHHAIDAVIIAYANNSIVKAFSDFKKEQESNSAELYAKKISELDYKNKRKFFEPFSGFRQKVLDKIDEIFVSKPERKKPSGALHEETFRKEEEFYQSYGGKEGVLKALELGKIRKVNGKIVKNGDMFRVDIFKHKKTNKFYAVPIYTMDFALKVLPNKAVARSKKGEIKDWILMDENYEFCFSLYKDSLILIQTKDMQEPEFVYYNAFTSSTVSLIVSKHDNKFETLSKNQKILFKNANEKEVIAKSIGIQNLKVFEKYIVSALGEVTKAEFRQREDFKK

SEQ ID NO: 897 - protein, 984 aa, Campylobacter jejuni
MARILAFDIGISSIGWAFSENDELKDCGVRIFTKVENPKTGESLALPRRLARSARKRLARRKARLNHLKHLIANEFKLNYEDYQSFDESLAKAYKGSLISPYELRFRALNELLSKQDFARVILHIAKRRGYDDIKNSDDKEKGAILKAIKQNEEKLANYQSVGEYLYKEYFQKFKENSKEFTNVRNKKESYERCIAQSFLKDELKLIFKKQREFGFSFSKKFEEEVLSVAFYKRALKDFSHLVGNCSFFTDEKRAPKNSPLAFMFVALTRIINLLNNLKNTEGILYTKDDLNALLNEVLKNGTLTYKQTKKLLGLSDDYEFKGEKGTYFIEFKKYKEFIKALGEHNLSQDDLNEIAKDITLIKDEIKLKKALAKYDLNQNQIDSLSKLEFKDHLNISFKALKLITPLMLEGKKYDEACNELNLKVAINEDKKDFLPAFNETYYKDEVTNPVVLRAIKEYRKVLNALLKKYGKVHKINIELAREVGKNHSQRAKIEKEQNENYKAKKDAELECEKLGLKINSKNILKLRLFKEQKEFCAYSGEKIKISDLQDEKMLEIDHIYPYSRSFDDSYMNKVLVFTKQNQEKLNKTPFEAFGNDSAKWQKIEVLAKNLPTKKQKRILDKNYKDKEQKDFKDRNLNDTRYIARLVLNYTKDYLDFLPLSDDENTKLNDTQKGSKVHVEAKSGMLTSALRHTWGFSTKDRNNHLHHAIDAVIIAYANNSIVKAFSDFKKEQESNSAELYAKKISELDYKNKRKFFEPFSGFRQKVLDKIDEIFVSKPERKKPSGALHEETFRKEEEFYQSYGGKEGVLKALELGKIRKVNGKIVKNGDMFRVDIFKHKKTNKFYAVPIYTMDFALKVLPNKAVARSKKGEIKDWILMDENYEFCFSLYKDSLILIQTKDMQEPEFVYYNAFTSSTVSLIVSKHDNKFETLSKNQKILFKNANEKEVIAKSIGIQNLKVFEKYIVSALGEVTKAEFRQREDFKK

SEQ ID NO: 898 - protein, 984 aa, Campylobacter jejuni
MARILAFDIGISSIGWAFSENDELKDCGVRIFTKVENPKTGESLALPRRLARSARKRLARRKARLNHLKHLIANEFKLNYEDYQSFDESLAKAYKGSLISPYELRFRALNELLSKQDFARVILHIAKRRGYDDIKNSDDKEKGAILKAIKQNEEKLANYQSVGEYLYKEYFQKFKENSKEFTNVRNKKESYERCIAQSFLKDELKLIFKKQREFGFSFSKKFEEEVLSVAFYKRALKDFSHLVGNCSFFTDEKRAPKNSPLAFMFVTLTRIINLLNNLKNTEGILYTKDDLNALLNEVLKNGTLTYKQTKKLLGLSDDYEFKGEKGTYFIEFKKYKEFIKALGEHNLSQDDLNEIAKDITLIKDEIKLKKALAKYDLNQNQIDSLSKLEFKDHLNISFKALKLITPLMLEGKKYDEACNELNLKVAINEDKKDFLPAFNETYYKDEVTNPVVLRAIKEYRKVLNALLKKYGKVHKINIELAREVGKNHSQRAKIEKEQNENYKAKKDAELECEKLGLKINSKNILKLRLFKEQKEFCAYSGEKIKISDLQDEKMLEIDHIYPYSRSFDDSYMNKVLVFTKQNQEKLNKTPFEAFGNDSAKWQKIEVLAKNLPTKKQKRILDKNYKDKEQKDFKDRNLNDTRYIARLVLNYTKDYLDFLPLSDDENTKLNDTQKGSKVHVEAKSGMLTSALRHTWGFSTKDRNNHLHHAIDAVIIAYANNSIVKAFSDFKKEQESNSAELYAKKISELDYKNKRKFFEPFSGFRQKVLDKIDEIFVSKPERKKPSGALHEETFRKEEEFYQSYGGKEGVLKALELGKIRKVNGKIVKNGDMFRVDIFKHKKTNKFYAVPIYTMDFALKVLPNKAVARSKKGEIKDWILMDENYEFCFSLYKDSLILIQTKDMQEPEFVYYNAFTSSTVSLIVSKHDNKFETLSKNQKILFKNANEKEVIAKSIGIQNLKVFEKYIVSALGEVTKAEFRQREDFKK

SEQ ID NO: 899 - protein, 984 aa, Campylobacter jejuni
MARILAFDIGISSIGWAFSENDELKDCGVRIFTKVENPKTGESLALPRRLARSARKRLARRKARLNHLKHLIANEFKLNYEDYQSFDESLAKAYKGSLISPYELRFRALNELLSKQDFARVILHIAKRRGYDDIKNSDDKEKGAILKAIKQNEEKLANYQSVGEYLYKEYFQKFKENSKEFTNVRNKKESYERCIAQSFLKDELKLIFKKQREFGFSFSKKFEEEVLSVAFYKRALKDFSHLVGNCSFFTDEKRAPKNSPLAFMFVALTRIINLLNNLKNTEGILYTKDDLNALLNEVLKNGTLTYKQTKKLLGLSDDYEFKGEKGTYFIEFKKYKEFIKALGEHNLSQDDLNEIAKDITLIKDEIKLKKALAKYDLNQNQIDSLSKLEFKDHLNISFKALKLITPLMLEGKKYDEACNELNLKVAINEDKKDFLPAFNETYYKDEVTNPVVLRAIKEYRKVLNALLKKYGKVHKINIELAREVGKNHSQRAKIEKEQNENYKAKKDAELECEKLGLKINSKNILKLRLFKEQKEFCAYSGEKIKISDLQDEKMLEIDHIYPYSRSFDDSYMNKVLVFTKQNQEKLNKTPFEAFGNDSAKWQKIEVLAKNLPTKKQKRILDKNYKDKEQKDFKDRNLNDTRYIARLVLNYTKDYLDFLPLSDDENTKLNDTQKGSKVHVEAKSGMLTSALRHTWGFSTKDRNNHLHHAIDAVIIAYANNSIVKAFSDFKKEQESNSAELYAKKISELDYKNKRKFFEPFSGFRQKVLDKIDEIFVSKPERKKPSGALHEETFRKEEEFYQSYGGKEGVLKALELGKIRKVNGKIVKNGDMFRVDIFKHKKTNKFYAVPIYTMDFALKVLPNKAVARSKKGEIKDWILMDENYEFCFSLYKDSLILIQTKDMQEPEFVYYNAFTSSTVSLIVSKHDNKFETLSKNQKILFKNANEKEVIAKSIGIQNLKVFEKYIVSALGEVTKAEFIQREDFKK

SEQ ID NO: 900 - protein, 987 aa, Campylobacter jejuni
MARILAFDIGISSIGWAFSENDELKDCGVRIFTKVENPKTGESLALPRRLARSARKRLARRKARLNHLKHLIANEFKLNYEDYQSFDESLAKAYKGSLISPYELRFRALNELLSKQDFARVILHIAKRRGYDDIKNSDDKEKGAILKAIKQNEEKLANYQSVGEYLYKEYFQKFKENSKEFTNVRNKKESYERCIAQSFLKDELKLIFKKQREFGFSFSKKFEEEVLSVAFYKRALKDFSHLVGNCSFFTDEKRVPKNSPLAFMFVALTRIINLLNNLKNTEGILYTKDDLNALLNEVLKNGTLTYKQTKKLLGLSDDYEFKGEKGTYFIEFKKYKEFIKALGEHNLSQDDLNEIAKDITLIKDEIKLKKALAKYDLNQNQIDSLSKLEFKDHLNISFKALKLITPLMLEGKKYDEACNELNLKVAINEDKKDFLPAFNETYYKDEVTNPVVLRAIKEYRKVLNALLKKYGKVHKINIELAREVGKNHSQRAKIEKEQNENYKAKKDAELECEKLGLKINSKNILKLRLFKEQKEFCAYSGEKIKISDLQDEKMLEIDHIYPYSRSFDDSYMNKVLVFTKQNQEKLNQTPFEAFGNDSAKWQKIEVLAKNLPTKKQKRILDKNYKDKEQKNFKDRNLNDTRYIARLVLNYTKDYLDFLPLSDDENTKLNDTQKGSKVHVEAKSGMLTSALRHTWGFSAKDRNNHLHHAIDAVIIAYANNSIVKAFSDFKKEQESNSAELYAKKISELDYKNKRKFFEPFSGFRQKVLDKIDEIFVSKPERKKPSGALHEETFRKEEEFYQSYGGKEGVLKALELGKIRKVNGKIVKNGDMFRVDIFKHKKTNKFYGVPIYTMDFALKVLPNKAVARSKKGEIKDWILMDENYEFCFSLYKDSLILIQTKDMQEPEFVYYNAFTSSTVSLIVSKHDNKFETLSKNQKILFKNANEKEVIAKSIGIQNLKVFEKYIVSALGEVTKAEFRQREDFKNELR

SEQ ID NO: 901 - protein, 984 aa, Campylobacter jejuni
MARILAFDIGISSIGWAFSENDELKDCGVRIFTKVENPKTGESLALPRRLARSARKRLARRKVRLNHLKHLIANEFKLNYEDYQSFDESLAKAYKGSLISPYELRFRALNELLSKQDFARVILHIAKRRGYDDIKNSDDKEKGAILKAIKQNEEKLANYQSVGEYLYKEYFQKFKENSKEFTNVRNKKESYERCIAQSFLKDELKLIFKKQREFGFSFSKKFEEEVLSVAFYKRALKDFSHLVGNCSFFTDEKRAPKNSPLAFMFVALTRIINLLNNLKNTEGILYTKDDLNALLNEVLKNGTLTYKQTKKLLGLSDDYEFKGEKGTYFIEFKKYKEFIKALGEHNLSQDDLNEIAKDITLIKDEIKLKKALAKYDLNQNQIDSLSKLEFKDHLNISFKALKLITPLMLEGKKYDEACNELNLKVAINEDKKDFLPAFNETYYKDEVTNPVVLRAIKEYRKVLNALLKKYGKVHKINIELAREVGKNHSQRAKIEKEQNENYKAKKDAELECEKLGLKINSKNILKLRLFKEQKEFCAYSGEKIKISDLQDEKMLEIDHIYPYSRSFDDSYMNKVLVFTKQNQEKLNKTPFEAFGNDSAKWQKIEVLAKNLPTKKQKRILDKNYKDKEQKDFKDRNLNDTRYIARLVLNYTKDYLDFLPLSDDENTKLNDTQKGSKVHVEAKSGMLTSALRHTWGFSTKDRNNHLHHAIDAVIIAYANNSIVKAFSDFKKEQESNSAELYAKKISELDYKNKRKFFEPFSGFRQKVLDKIDEIFVSKPERKKPSGALHEETFRKEEEFYQSYGGKEGVLKALELGKIRKVNGKIVKNGDMFRVDIFKHKKTNKFYAVPIYTMDFALKVLPNKAVARSKKGEIKDWILMDENYEFCFSLYKDSLILIQTKDMQEPEFVYYNAFTSSTVSLIVSKHDNKFETLSKNQKILFKNANEKEVIAKSIGIQNLKVFEKYIVSALGEVTKAEFRQREDFKK

SEQ ID NO: 902 - protein, 721 aa, Campylobacter jejuni
MFVALTRIINLLNNLKNTEGILYTKDDLNTLLNEVLKNGTLTYKQTKKLLGLSDDYEFKGEKGTYFIEFKKYKEFIKALGDHSLSQDDLNEIAKDITLIKDEIKLKKALAKYDLNQNQIDSLSKLEFKDHLNISFKALKLITPLMLEGKKYDEACNELNLKVAINEDKKDFLPAFNETYYKDEVTNPVVLRAIKEYRKVLNALLKKYGKVHKINIELAREVGKNYSQRAKIEKEQNENYKAKKDAELECEKLGLKINSKNILKLRLFKEQKEFCAYSGEKIKISDLQDEKMLEIDHIYPYSRSFDDSYMNKVLVFTKQNQEKLNQTPFEAFGNDSAKWQKIEVLAKNLPTKKQKRILDKNYKDKEQKDFKDRNLNDTRYIARLVLNYTKDYLDFLPLSDDENTKLNNTQKGSKVYVEAKSGMLTSALRHTWGFSTKDRNNHLHHAIDAVIIAYANNSIVKAFSDFKKEQESNSAELYAKKISELDYKNKRKFFEPFSGFRQKVLDKIDEIFVSKPERKKPSGALHEETFRKEEEFYQSYGGKEGVLKALELGKIRKVNGKIVKNGDMFRVDIFKHKKTNKFYAVPIYTMDFALKVLPNKAVARSKKGEIKDWILMDENYEFCFSLYKDSLILIQTKDMQEPEFVYYNAFTSSTVSLIVSKHDNKFETLSKNQKILFKNANEKEVIAKSIGIQNLKVFEKYIVSALGEVTKAEFRQREDFKK

SEQ ID NO: 903 - protein, 512 aa, Campylobacter jejuni
MHKINIELAREVGKNHSQRAKIEKEQNENYKAKKDAEIECEKLGLKINSKNILKLRLFKEQKEFCAYSGEKIKLSDLQDEKMLEIDHIYPYSRSFDDSYMNKVLVFTKQNQEKLNKTPFEAFGNDSTKWQKIEVLAKNLPEKKQKRILDKNYKDKEQKDFKDRNLNDTRYIARLVLNYTKDYLDFLPLSDDENTKLNDTQKGSKVHVEAKSGMLTSALRHTWGFSAKDRNNHLHHAIDAAIIAYANNSIVKAFSDFKKEQESNSVELYAKKISELDYKNKRKFFEPFSGFRQKVLDKIDEIFVSKPERKKPSGALHEETFRKEEEFYQSYGGKEGVLKALELGKIRKVNGKIVKNGDMFRVDIFKHKKTNKFYAVPIYTMDFALKVLPNKAVARSKKGEIKDWILMDENYEFCFSLYKDSLILIQTKDMQEPELVYFNAFTSSTVSLIVSKHDNKFETLSKNQKILFKNANEKEVIAKSIGIQNLKVFEKYIVSALGEVTKAEFRQREDFKK

SEQ ID NO: 904 - protein, 965 aa, Campylobacter jejuni
MKIIGFNLGIANIGWALRENDEIIDCGVRVFDIPENPKNGNSLALERRENKARMKIVKRKKARMLATKTFLKKELNVDLSKLFLIGSTQSIYELRAKALSSLISKEELSAIILHIAKHRGYDDSALKNENGTIIEALNKNKETMLKFKSVGEYFYKNFVQNKEVKKIRNTTEDYSNSVPRSLLKQELDLILDKQKELGLIKNADFKEKLFEIIFFKRPLKDFSNKIGNCIFFENEKRAAKNTISACEFVALGKVVNLLKSIEKDIGIVYEKDSINEIMSIILDKTSISYKKIRDILNLPQEINFKGLDYSKNNVENSKLVDLKKLNEFKKALGDGFANLDKDILDSIATDITLTKDTATLKEKLKNYNVLNAEQIEKLSELVFNDHINLSLKALKQIIPLMYEGKRYDEACELCNFTIAKNQEKSEYLPLFEKTRFAKDISSPVVIRAICEFRKLLNDIIRRYGSVHKIHLELTRDFGISFSDRKKIIKEIEQNEQSRIKALETIKELKLEETSKNIQIVRLFEDQKGICPYSGLKMDLNRLDELVIDYIRPYNRSLDDSYSNKVLTFKKLSDLKQGKTPFEAFGEDEKLWAEINERIKEYNGKKRFKIFDKFFKDKKPFDFTEQTLQDTRWLTKLVASYLNEYLSFLPISEDENTALGYGEKGSKQHVILSSGMITQMLRNFWYLGFKNHKDYKNNAMDAIIVAFTTNSIIFAFNNFKKELDLAKAEFYANKISESDYLLKRKFLPPFSGFKEQALEKVKNIFVSHSLKIKNKGTLHDLTPLKIKELKNTYGDLDLAVKLGKIRKYNDKYYANANGSLVRADLFVDKKNKFHAVSIYKADFSTKKLPNKTPATTSNGETKEGIEMNENYNFCMSLYKNTPISVKIKGMKEPIICYYHGFNTSGSKITYKKHDNNYHNLSEDEMVVFRKNDKESIAVGKILEIKKYSISPSGELSLIENEERKWF

SEQ ID NO: 905 - protein, 759 aa, Campylobacter jejuni
MLSVAFYKRALKDFSHLVGNCSFFTDEKRAPKNSPLAFMFVALTRIINLLNNLKNTEGILYTKDDLNALLNEVLKNGTLTYKQTKKLLGLSDDYEFKGEKGTYFIEFKKYKEFIKALGEHNLSQDDLNEIAKDITLIKDEIKLKKALAKYDLNQNQIDSLSKLEFKDHLNISFKALKLITPLMLEGKKYDEACNELNLKVAINEDKKDFLPAFNETYYKDEVTNPVVLRAIKEYRKVLNALLKKYGKVHKINIELAREVGKNHSQRAKIEKEQNENYKAKKDAELECEKLGLKINSKNILKLRLFKEQKEFCAYSGEKIKISDLQDEKMLEIDHIYPYSRSFDDSYMNKVLVFTKQNQEKLNKTPFEAFGNDSAKWQKIEVLAKNLPTKKQKRILDKNYKDKEQKDFKDRNLNDTRYIARLVLNYTKDYLDFLPLSDDENTKLNDTQKGSKVHVEAKSGMLTSALRHTWGFSTKDRNNHLHHAIDAVIIAYANNSIVKAFSDFKKEQESNSAELYAKKISELDYKNKRKFFESFSGFRQKVLDKIDEIFVSKPERKKPSGALHEETFRKEEEFYQSYGGKEGVLKALELGKIRKVNGKIVKNGDMFRVDIFKHKKTNKFYAVPIYTMDFALKVLPNKAVARSKKGEIKDWILMDENYEFCFSLYKDSLILIQTKDMQEPEFVYYNAFTSSTVSLIVSKHDNKFETLSKNQKILFKNANEKEVIAKSIGIQNLKVFEKYIVSALGEVTKAEFRQREDFKK

SEQ ID NO: 906 - protein, 984 aa, Campylobacter jejuni
MVRILAFDIGISSIGWAFSENDELKDCGVRIFTKVENPKTGESLALPRRLARSARKRLARRKARLNHLKHLIANEFKLNYEDYQSFDESLAKAYKGSLISPYELRFRALNELLSKQDFARVILHIAKRRGYDDIKNSDDKEKGAILKAIKQNEEKLANYQSVGEYLYKEYFQKFKENSKEFTNVRNKKESYERCIAQSFLKDELKLIFKKQREFGFSFSKKFEEEVLSVAFYKRALKDFSHLVGNCSFFTDEKRAPKNSPLAFMFVALTRIINLLNNLKNTEGILYTKDDLNALLNEVLKNGTLTYKQTKKLLGLSDDYEFKGEKGTYFIEFKKYKEFIKALGEHNLSQDDLNEIAKDITLIKDEIKLKKALAKYDLNQNQIDSLSKLEFKDHLNISFKALKLITPLMLEGKKYDEACNELNLKVAINEDKKDFLPAFNETYYKDEVTNPVVLRAIKEYRKVLNALLKKYGKVHKINIELAREVGKNHSQRAKIEKEQNENYKAKKDAELECEKLGLKINSKNILKLRLFKEQKEFCAYSGEKIKISDLQDEKMLEIDHIYPYSRSFDDSYMNKVLVFTKQNQEKLNKTPFEAFGNDSAKWQKIEVLAKNLPTKKQKRILDKNYKDKEQKDFKDRNLNDTRYIARLVLNYTKDYLDFLPLSDDENTKLNDTQKGSKVHVEAKSGMLTSALRHTWGFSTKDRNNHLHHAIDAVIIAYANNSIVKAFSDFKKEQESNSAELYAKKISELDYKNKRKFFEPFSGFRQKVLDKIDEIFVSKPERKKPSGALHEETFRKEEEFYQSYGGKEGVLKALELGKIRKVNGKIVKNGDMFRVDIFKHKKTNKFYAVPIYTMDFALKVLPNKAVARSKKGEIKDWILMDENYEFCFSLYKDSLILIQTKDMQEPEFVYYNAFTSSTVSLIVSKHDNKFETLSKNQKILFKNANEKEVIAKSIGIQNLKVFEKYIVSALGEVTKAEFRQREDFKK

SEQ ID NO: 907 - protein, 1003 aa, Campylobacter lari]
MRILGFDIGINSIGWAFVENDELKDCGVRIFTKAENPKNKESLALPRRNARSSRRRLKRRKARLIAIKRILAKELKLNYKDYVAADGELPKAYEGSLASVYELRYKALTQNLETKDLARVILHIAKHRGYMNKNEKKSNDAKKGKILSALKNNALKLENYQSVGEYFYKEFFQKYKKNTKNFIKIRNTKDNYNNCVLSSDLEKELKLILEKQKEFGYNYSEDFINEILKVAFFQRPLKDFSHLVGACTFFEEEKRACKNSYSAWEFVALTKIINEIKSLEKISGEIVPTQTINEVLNLILDKGSITYKKFRSCINLHESISFKSLKYDKENAENAKLIDFRKLVEFKKALGVHSLSRQELDQISTHITLIKDNVKLKTVLEKYNLSNEQINNLLEIEFNDYINLSFKALGMILPLMREGKRYDEACEIANLKPKTVDEKKDFLPAFCDSIFAHELSNPVVNRAISEYRKVLNALLKKYGKVHKIHLELARDVGLSKKAREKIEKEQKENQAVNAWALKECENIGLKASAKNILKLKLWKEQKEICIYSGNKISIEHLKDEKALEVDHIYPYSRSFDDSFINKVLVFTKENQEKLNKTPFEAFGKNIEKWSKIQTLAQNLPYKKKNKILDENFKDKQQEDFISRNLNDTRYIATLIAKYTKEYLNFLLLSENENANLKSGEKGSKIHVQTISGMLTSVLRHTWGFDKKDRNNHLHHALDAIIVAYSTNSIIKAFSDFRKNQELLKARFYAKELTSDNYKHQVKFFEPFKSFREKILSKIDEIFVSKPPRKRARRALHKDTFHSENKIIDKCSYNSKEGLQIALSCGRVRKIGTKYVENDTIVRVDIFKKQNKFYAIPIYAMDFALGILPNKIVITGKDKNNNPKQWQTIDESYEFCFSLYKNDLILLQKKNMQEPEFAYYNDFSISTSSICVEKHDNKFENLTSNQKLLFSNAKEGSVKVESLGIQNLKVFEKYIITPLGDKIKADFQPRENISLKTSKKYGLR

SEQ ID NO: 908 - protein, 372 aa, candidate division
DNESAINQIAYILTTQKADEGIRAELDSLPLSDKAKKAIVKIKPTNFKAFGHLSIKALQKITPHILEGMTYDKACEAAGYDFKKQSASLEQITNPVVKRAITQTLKVVRAIERKYGKPYFIKVETARDLAKNFKDRNAIKKENEENQGYNEDIKSIITNGYEASPKTKGGKQLLNHLKEFNVRLNKNADFNGQQIIKVKLYREQQGKCLYSGNPIDFETMLRDDNAYQVDHIVPFSRSNNDGITNKVLVFTEENQKKADRTPFEYFGTDERRWEKFVALVETTYKTRDVKTSDKATNAINYEYNGYAMKKKQNLLLQDYKNDSWNVRALNDTRYITRFIQNYLRQNVDFAEGEEKQRIIAPNGTTTAYLRKR

SEQ ID NO: 909 - protein, 1117 aa, Capnocytophaga ochracea
MKHILGLDLGSNSIGWAFVQQDFENKQGKIIATGSRIIPMDQGILGDFERGNTVSQTAERTTYRSMRRLRERHLLRRERLHRVLHLLGFLPPHYDAQIDFTKRYGKFIDNAEPKIAYNNGNFIFMNSFNEMVEDFKKHQPQLFYKKSNGEESRIPYDWTIYYLRKKALSQKITQQELAWLILHFNQKRGYYQLRGEEETENPNKEVAFHSLKVVDVEAEAPNKKGEIWYTIRLENGWIYRRTSKNPLDDWKGKTRDFIVTTDLNDDGTIKLDKEGKEKRSFRAPDENDWNLLKKKTEHDIDFSGKPVGTYIYDHLLQNPNQKIKGKLVRTIERKYYKDELKAILAKQIALQPELFTETLLADCIRELYRKNETQQQNLLSKDFLHLFVEDIIFYQRPLCSKKSTIANCTLEKRSYIDKETNERKDAPIKVCAKSNPYYQEFRVLQWLQNLRIYEIETDREVTAEFIETPQDYEALFNFLMSQKEIDNEGLLKYFLFAKNPQIKDKAAKSELKKWLTTYRWNYVYDAADNSSKKYPMNETGYELQRYLQKVEGLPANFLTFDITYQLWHLLYSVKDKVEFEKALKKFAKKKQLDKTSFVDSFKNFKPYPNEYGSFSEKAIKKLLPLMRFGNHWDFNRIDVSTQKRIDDLINGVANEDIRTIIREKAEKYQLNSETCFQDLPLWLAQYVVYNRHAEATDIEKWTSVSDLEAYLEDFKQHSLRNPIVEQVVTETLRVVRDIWQQYSGGQANFFDEIHIELGRELKKTAEERKQLSDKNQENENTNLRIKKLLAELKEDASIQNVRPYSLVQQELLKIYEEGVFSSTDEIEEDIQKIRKKVEPTPPEIQRYKLWLEQKYKSPYTGEVISLTKLFTEEYEIEHIIPQSRYYDDSLSNKVICESAVNKLKTNQLGLEFIQNHHGEKVRITANKEVTIFTEEQYKEFVKKHYANNSAKQQKLLLNEIPEKMVARQLNDTRYISKCISEILSKIVRSDEKDEGVNSKNIIPCTGKITTALKQDWGLNDVWNELILPRFERMNQLTQTQLFTSYNDRLQKNLPTVPIEYSQGFQKKRIDHRHHAMDALVIACATREHINYMNNQHALDKSKDKKEKQQSRIDLHPL

SEQ ID NO: 910 - protein, 303 aa, Capnocytophaga ochracea
MSFKQNLRVINKATNYYEKWEEKNGVLVKKKVKQEGTNWAIRKPLHKETVSGKIVLDRKIGKDKILTATRKAVDITFTEKIISSITDTGIQKILLNYLKYKGSPEVAFSAEGLEELNKNIAQYNDGKKHQPIYKVRIFEEGSKFPLGETGAKATKYVEAAKGTNLFFGVYQGKEKRTYATIPLNEVIERQKQGLPSVPERNEKGEPLLFSLSPNDLVYVPMEGEIAETIDFNNLSKEQKERIYKTVSFTGNQCFFVQEAVASPIVNKMEYSPLNKMERDILGIMIKEVCVKLKVDRLGNIIKA

SEQ ID NO: 911 - protein, 1471 aa, Unknown
  Capnocytophaga sp. oral taxon 324 str. F0483
MCKYFYIKNFITFVLSKSIIPMKHILGLDLGSNSIGWAFVQQDFENKQGKIIATGSRIIPMDQGILGDFERGNTVSQTAERTTYRSTRRLRERHLLRRERLHRVLHILGFLPPHYDAQIDFTKRYGKFIDNAEPKIAYNNGNFIFMNSFNEMIEDFKKHQPQLFYKKSNGEESKIPYDWTIYYLRKKALSQKITQQELAWLILHFNQKRGYYQLRGEEETENPNKEVAFHSLKVVDVEAEAPNKKGEIWYTIRLENGWIYRRTSKIPLDDWKGKTRDFIVTTDLNDDGTIKVDKEGKEKRSFRAPDENDWNLLKKKTEHDIDFSGKTVGAYIYDHLLQNPNQKIKGKLVRTIERKYYKDELKAILAKQIALQPELFTETLLADCIRELYRKNETQQQNLLSKDFLHLFVEDIIFYQRPLRSKKSTIANCTLEKRSYIDKETNERKDAPIKVCAKSNPYYQEFRVLQWLQNLRIYEIETDREVTAEFIETPQDCEALFNFLMSQKEIDNKGLLKYFLFAKNPQIKDKAAKSELKKWLTTYRWNYVYDAADNSSKKYPMNETGYELQRYLQKVEGLPANFLTFDITYQLWHLLYSVKDKVEFEKALKKFAKKKQLDKTSFVDSFKNFKPYPNEYGSFSEKAIKKLLPLMRFGNHWDFNRIDVSTQKRIDDLINGVANEDIRTIIREKAEKYQLNSETCFQDLPLWLAQYVVYNRHAEATDIEKWTSVSDLEAYLEDFKQHSLRNPIVEQVVTETLRVVRDIWQQYGGGQANFFDEIHIELGRELKKTAEERKQLSDKNQENESTNLRIKKLLAELKEDASIQNVRPYSLVQQELLKIYEEGVFSATDEVEEDIQKIRKKAEPSKADLQRYKLWLEQKYKSPYTGEVISLTKLFTEEYEIEHIIPQSRYYDDSLSNKVICESAVNKLKTNQLGLEFIQNHHGEKVRITANKEVTIFTEEQYKEFVKKHYANNSAKQQKLLLNEIPEKMVARQLNDTRYISKYISEILSKIVRSDEKDEGVNSKNIIPCTGKITTALKQDWGLNDVWNKLILPRFERMNQLTQTQLFTSYNDRLQKNLPTVPIEYSQGFQKKRIDHRHHAMDALVIACATREHINYMNNQHALDKSKDKKEKQQSRIDLRTILCEKKNNNWQFKKPWSTFTQEAKEALEHIVVSFKQNLRVINKATNYYEKWEEKNGVLVKKKVKQEGTNWAIRKPLHKETVSGKIVLDRKIGKDKILTATRKAVDITFTEKIISSITDTGIQKILLNYLKYKGSPEVAFSTEGLEELNKNIAQYNNGKKHQPIYKVRIFEEGSKFPLGETGAKATKYVEAAKGTNLFFGVYQGKGKRTYATIPLNEVIERQKQGLPSVPERNEKGEPLLFSLSPNDLVYVPMEGEIAETIDFNNLSKEQKERIYKTVSFTGNQCFFVQEAVATPIVNKMEYSPLNKMERDILGTMIKEVCIKLKVDRLGNITKA

SEQ ID NO: 912 - protein, 1450 aa, Unknown
  Capnocytophaga sp. oral taxon 412 str. F0487
MKHILGLDLGSNSIGWAFVQQDFENKQGKIIATGSRIIPMDQGILGDFERGNTVSQTAERTTYRNTRRLRERHLLRRERLHRVLHILGFLPPHYDSQIDFTKRYGKFIDNAEPKIAYNNGNFIFMNSFNEMIEDFKKYQPQLFYKKSNGEESKIPYDWTIYYLRKKALSQKITQQELAWLILHFNQKRGYYQLRGEEETENPNKEVAFHSLEVVDVEAEAPNKKGEIWYTIRLENGWIYRRTSKIPLDDWKGKTRDFIVTTDLNDDGTIKLDKEGKEKRSFRAPDENDWNLLKKKTEHDIDFSGKTVGAYIYDHLLQNPNQKIKGKLVRTIERKYYKDELKAILAKQIALQPELFTETLLADCIRELYRKNETQQQNLLSKDFLHLFVEDIIFYQRPLRSKKSTIANCTLEKRSYIDKETNERKDTPIKVCAKSNPYYQEFRVLQWLQNLRIYEIETDREVTAEFIETAQDNEALFNFLMSQKEIDNESLLKYFLFAKNPQIKDKVAKSELKKWLTTYRWNYVYDAADNSSKKYPMNETGYELQQYLQKVEGLPANFLTFDITYRLWHLLYSVKDKVEFEKALKKFAQEYQLDEASFVDSFKNFKPYPNEYGSFSEKAIKKLLPLMRFGNHWDFNRIDVSTQKRIDDLINGVANDEIRTIIREKAEKYQLNSETCFQGLPLWLAQYVVYNRHAEAADIEKWTSVNDLEAYLEDFKQHSLRNPIVEQVITETLRVVRDIWQRYGGGQANFFDEIHIELGRELKKTAEERKQLSNRNQENENTNLRIKKLLAELKEDASIQNVRPYSPVQQELLKIYEEGVFSATDEVEEDIQKIRKKAEPTTPEIQRYKLWLEQKYKSPYTGEVISLTKLFTEEYEIEHIIPQSRYYDDSLSNKVICESAVNKLKTNQLGLEFIQNHHGEKVRITANKEVTIFTEEQYKEFVKKHYANNSAKQQKLLLNEIPEKMVARQLNDTRYISKYISEILSKIVRSDEKDEGVNSKNIIPCTGKITTALKQDWGLNDVWNELILPRFERMNQLTQTQLFTSYNDRFQKNLPTVPIEYSQGFQKKRIDHRHHAMDALVIACATREHINYMNNQHALDKSKDKKEKQQSRIDLRTILCEKKNNNWQFKKPWSTFTQEAQEALEHIVVSFKQNLRVINKATNYYEKWEEKNGVLVKKKVKQEGTNWAIRKPLHKETVSGKIVLDRKIGKDKILTATRKSVDITFTEKIISSITDTGIQKILLNYLKYKGSPEVAFSAEGLEELNKNIAQYNDGKKHQPIYKVRIFEEGSKFPLGETGAKATKYVEAAKGTNLFFGVYQGKGKRTYATIPLNEVIERQKQGLPSVPERNEKGEPLLFSLSPNDLVYVPMEGEIAETIDFNNLSKEQKERIYKTVSFTGNQCFFVQEAVATPIVNKIEYSPLNKMERDILGTMIKEVCIKLKVDRLGNITKA

SEQ ID NO: 913 - protein, 1435 aa, Unknown
  Capnocytophaga sp. oral taxon 329 str. F0087
MKNILGLDLGTTSIGFAHIVEDENKEKSEIKELGVRIVSLATDEQSDFEKGKSISTNANRTLKHGARLNLDRYQQRRKFLIDLLQKANLITSASILAENGKNTTHSTWQLRAKAVTERIEKEEFARVLLAINKKRGYKNSRKTKTEDEGQAIDGMAIAKCLYDENLTPGQLSLQLLQQNKKLLPDFYRSDLQKEFDLVWNLQKQFYPDILTDSFYKELQGKGKDATSKAFSKRYHFDTAENKGSKESVRLQAYQWRAEAISKQLSKEEVAYVLTEINNNLNNSSGYLGAISDRSKELYFNRQTVGQYLYAQLQENRHNSLKNKVFYRQDYLDEFERIWETQASFHKELTDELKKQIRDVVIFYQRKLKSQKGLVSFCEFESKEIEIEKDGKAITKSIGARVVPKSSPLFQEFKIWQILNNVTCKRKGIRKKKSSAKSTELDLFNEPSQSIFSLDMECKQLLFDELNLKGDLKSDKVLKLLGYSPQEWEINYNQLEGNRTQKSLYEAYLKIIEIEGYEVKDILQIKSTKDDWSLDESPLSASEIRERVKVIFQTLGICTKILYFDPLLPVKEFEQQYSYQLWHLLYSYESDDSTSGNETLYRILEKKYAFKREHATILANVALQDDYGSLSTKAIRKIYPYIKENQYSTACELAGYKHSKLSLTTEELEARELKNIIPLLKKNALRNPVVEKILNQMINVVNALIEKNSERDAEGKITKYFHFDEIRIELARELKKNAQERYEMTQNINKAKLEHQKISEKLQKQFGIKNPTKSDIIRYRLYQELEHNGYKELYTNTYIAPDVLFSKNIDIEHIVPKARVFDDSFSNKTLAFKEFNIKKGESTAFDYITSLNCEGELNQYLTRVENAYKTKSISLTKYKNLLKKASEIGDGFINRDLRDTQYIAKKAKEILFQVTKNVLSTSGSITDRLREDWGLVDVMKELNMPKYQSLGLTEVEERKDGNKVTVIKDWTKRNDHRHHAMDALTVAFTKPSYIQYLNHLNARKDENNKNYSVILAIEKKETIKVPINNGKNKRVFIEPILNFRQVAKKHLEEIFISHKAKNKVVTKNINKPAGTDKQQITLTPRGQLHKETIYGKYQYYVNKEEKVGVKFDERTITKVSNPLYREALLKRLQANDNDPKKAFAGKNALSKNPIYLDEAKTKTLPEKVNLTYLEEDFSIRKDISPDNFKDLKSIEKVIDQGVKRILIKRLQAYDNDPKKAFVDLEKNPIWLNKEKGIAIKRVTISGVSNAQPLHIGKDHLGKTTLNKEGKEVPVDYVSTGNNHHVAIYRDKEGNLQEQIVSFFEAVVRAQQGLPIIDKNYKQAEGWQFMFTMKQNEMFVFPNEATGFNPAEIDLLDPKNKKLISPNLFRVQTISIVKYGNSVVRDFKFRHHLETTLQDDKILQGITFQQIKSLEPLRNIVKVRINHLGDIVNIGEY

SEQ ID NO: 914 - protein, 1432 aa, Unknown
  Capnocytophaga sp. oral taxon 380 str. F0488
MKNILGLDLGTTSIGFAHIVEDENKEKSEIKELGVRIVSLTTDEQSDFEKGKSITTNANRTLKHGARLNLDRYQQRRKYLIDLLHKANLITPSSILAENGKNTTHSTWQLRAKAVTERIEKEEFARILLAINKKRGYKSSRKAKTEDEGQAIDGMAIAKRLYDENLTPGQLSLQLLQQNKKLLPDFYRSDLQKEFDLVWNFQKQFYPDILTDIFYKELQGKGKDATSKAFSKRYHFDTAENKGSKESVRLQAYQWRAEAVSKQLSKEEVAYVLTEINNNLNNASGYLGAISDRSKELYFNRQTVGQYLYAQLQENRHNSLKNKVFYRQDYLDEFERIWETQALFHKELTDELKKQIRDVVIFYQRKPKSQKGLISFCEFESKEIEIEKDGKTITKNIGARVVPKSSPLFQEFKIWQILNNVICKRKGIRKKKISAKTTQLDLLNESSQTIFSLDMECKQLLFDELNLKGDLKSDKVLKLLGYSPQEWEINYNQLEGNRTQKALYEAYLKIVEMEAHDVKDILQIKSTKDDWSLDESPLSASEIRESVKAIFQALGICTKILYFDPLLPVKDFEEQDSYQLWHLLYSYESDDSTSGNETLYRILEKKYAFKREHARILANVALQDDYGSLSTKAIRKIYPNIKENQYSTACEMAGYKHSKLSLTTEELEARELKNIIPLLKKNALRNPVVEKILNQMINVVNALIEKNSERDAEGKITKYFHFDEIRIELARELKKNAQKRYEMTQNINKAKSEHQKISEILQKEFGIKNPTKSDIIRYRLYKELEHNGYKELYTNTYIAPDVLFSKNIDIEHIVPKARVFDDSFSNKTLAFKDFNIKKGESTAFDYITSLKNEEKLNQYLARVENAYKTKNISPAKYKNLLKKASEIGDGFINRDLRDTQYIAKKAKEILFQVTKNVLSTSGSITDRLREDWSLVDVMKELNMPKYQSLGLTEVEERKDGNKVTVIKDWTKRNDHRHHAMDALTVAFTKPSYIQYLNHLNARKDENNKNYSVILAIEKKETIKVPTNNGKNKRVFIEPIPNFRQVAKKHLEEIFISHKAKNKVVTKNTNKPAGTNKQQITLTPRGQLHKETIYGKYQYYVNKEEKVGVKFDKETIAKVSNPLYREALLKRLQANDNDPKKAFTGKNALSKNPIYLDEAKTKTLPEKVNLTYLEEDFSVRKKIVPKNPTSKEFVPNLKSIEKVVDEGVRNILIERLRVYNNDPEKAFVDLEKNPIWLNKEKGIAIKRVTISGVNNAQPLHIGKDHLGKTTLNKEGKEIPVDYVSTGNNHHVAIYRDKEGNLQEQIVSFFEAVVRTQQGLPIIDKTYKQEEGWQFLFTMKQNEMFVFPNEATGFNPAEIDLLDPKNKKQISPNLFRVQKIATKDYFFRHHLETNVETDNVLKNTTWKREGLSGLKDIVKVRINHLGDIVSIGEY

SEQ ID NO: 915 - protein, 1426 aa, Unknown
  Capnocytophaga sp. oral taxon 335 str. F0486
MKNILGLDLGTTSIGFTHIVEDENKEKSEIKELGVRIVSLTTDEQSDFEKGKSISTNANRTLKHGARLNLDRYQQRRKFLIDLLQKANLITSSSILAENGKNTTHSTWQLRAKAVTERIEKEEFARVLLAINKKRGYKSSRKAKTEDEGQAIDGMAIAKRLYDENLTPGQLSLQLLQQNKKLLPDFYRSDLQKEFDLVWNFQKQFYPDILTDSFYKELQGKGKDATSKAFSKRYHFDTAENKGSRESVRLQAYQWRAEAISKQLSKEEVAYVLTEINNNLNNASGYLGAISDRSKELYFNRQTVGQYLYAQLQENKHNSLKNKVFYRQDYLDEFERIWETQASFHKELTEELKKQIRDVVIFYQRKLKSQKGLISFCEFESKEIEIEKDGKTITKSIGARVVPKSSPLFQEFKIWQILNNVTCKRKGIRKKKSSAKSTELDLFNEPSQTIFSLDMECKQLLFEELNLKGDLKSDKVLKLLGYSPQEWEINYNQLEGNRTQKALYEAYLKIVEMEAHDVKDILQIKSTKDDWALEESPLSASEIRERVKAIFQTLGICTKILYFDPLLPVKEFEEQDSYQLWHLLYSYESDDSTSGNETLYRILEKKYAFKREHATILANVTLQDDYGSLSTKAIRKIYPYIKENQYSTACEKAGYKHSKLSLTTEELEARELKNIIPLLKKNALRNPVVEKILNQMINVVNALIEKNSERDAEGKITKYFHFDEIRIELARELKKNAQERYEMTQNINKAKLEHQKISGILQKEFGIKNPTKSDITRYRLYQELAHNGYNDLYTNTYIPKELLFSKNIDIEHIVSKARVFDDSFSNKTLAFREFNIKKGESTAFDYITSLNNEEELNQYLNRVENAYKTKNISPAKYKNLLKKASEIGDGFINRDLRDTQYIAKKAKEILFQVTKNVLSTSGSITDRLREDWGLVDVMKELNMPKYQSLGLTEVEERKEGNKVTVIKNWTKRNDHRHHAMDALTVAFTKPSYIQYLNHLNARKDKNNKNYSVILAIEEKETIKVPTNNGKNKRVFIEPIPNFRQVAKKHLEEIFISHKAKNKVVTKNTNKPAGTDKQQITLTPRGQLHKETVYGKYQYYVNKEEKIGVKFDKETIAKVSNPVYREALLKRLQANDNDPKKAFAGKNALSKNPIYLDEAKTKTLTEKVNLTYLEEDFSIRKDISPDNFKDLKSIEKVIDQGVKRILIKRLQDYDNDPKKAFVDLEKNPIWLNKEKGIAIKRVTISGVNNAQPLHIGKDHLGKTTLNKEGKEIPVDYVSTGNNHHVAIYRDKEGNLQEQIVSFFEAVVGAQQGLPIVDKTYKQAEGWQFLFTMKQNEMFVFPNEATGFNPAEIDLLDPKNKKQISPNLFRVQKIATKDYFFRHHLETNVDTDNVLKNTTWKREGLSGLKDIVKVRINHLGDIVSIGEY

SEQ ID NO: 916 - protein, 1450 aa, Unknown
  Capnocytophaga sp. oral taxon 326 str. F0382
MKRILGLDLGSNSIGWAFVEQDFENKQGKIIATGSRIIPMDQGILGDFEKGNTVSQTAERTTYRSMRRLRERHLLRRERLHRVLHILGFLPPHYDAQIDFTKRYGKFIDNAEPKIAYNNGNFIFMNSFNEMIEDFKKYQPQLFYKKSNGEESKIPYDWTIYYLRKKVLSQKITQQELAWLILHFNQKRGYYQLRGEEETENPNKEVAFHSLKVVDVEAEAPNKKGEIWYTIRLENGWIYRRTSKIPLDDWKGKTRDFIVTTDLNDDGTIKVDKEGKEKRSFRAPDENDWNLLKKKTEHDIDFSGKTVGAYIYDHLLQNPNQKIKGKLVRTIERKYYKDELKAILAKQIALQPELFTETLLADCIRELYRKNETQQQNLLSKDFLHLFVEDIIFYQRPLRSKKSTIANCTLEKRSYIDKETNERKDTFIKVCAKSNPYYQEFRVLQWLQNLRIYEIETDREVTAEFIETAEDYEALFNFLMSQKEIDNEGLLKYFLFAKNPQIKDKVAKSELKKWLTTYRWNYVYDAADNSSKKYPMNETGYDLQRYLQKVEGLPANFLTFDITYRLWHLLYSVKDKVEFEKALKKFAQEYQLDEASFVDSFKNFKPYPNEYGSFSEKAIKKLLPLMRFGNHWDFNRIDVSTQKRIDDLINGVANDEIRTIIREKAEKYQLNSESCFQGLPLWLAQYVVYNRHAEATDIEKWTSVSDLETYLEDFKQHSLRNPIVEQVVTETLRVVRDIWQQYGGGQANFFDEIHIELGRELKKTAEERKQLSNRNQENENTNLRIKKLLAELKEDASIQNVRPYSPVQQELLKIYEEGVFSSTDQVEEDIQKIRKKAEPTTPEIQRYKLWLEQKYKSPYTGEVISLTKLFTEEYEIEHIIPQSRYYDDSLSNKVICESAVNKLKTNQLGLEFIQNHHGEKVRITGNKEVTIFTEEQYKEFVKKHYANNSAKQQKLLLNEIPEKMVARQLNDTRYISKYISEILSKIVRSDEKDEGVNSKNVIPCTGKITTALKQDWGLNDVWNELILPRFERMNQLTQTQLFTSYNDRFQKNLPTVPIEYSQGFQKKRIDHRHHAMDALVIACATREHINYMNNQHALDKNKDKKEKQQSRIDLRTILCEKKNNNWQFKKPWSTFTQETKEALEHIVVSFKQNLRVINKATNYYEKWEEKNGVLVKKKVKQEGTNWAIRKPLHKETVSGKIVLDRKIGKDKILTATRKEVDITFTEKIISSITDTGIQKILLNYLNYKGSPEVAFSAEGLEELNKNIAQYNDGKKHQPIYKVRIFEEGSKFPLGETGAKATKFVEAAKGTNLFFGVYQGKEKRSYATIPLNEVIERQKQGLPSVPERNEKGEPLLFSLSPNDLVYVPMEGEIAETIDFNNLSKEQKERIYKTVSFTGNQCFFVQEAVATPIVNKMEYSPLNKMERDILGTMIKEVCIKLKVDRLGNITKA

SEQ ID NO: 917 - protein, 1437 aa, Unknown
  Capnocytophaga sp. CM59
MKYIKYILGLDIGSNSIGWALIQLDLLQKTKRIIATGSRIIPMDQKVLSDFGKGITISPTAQRTSYRNARHCRERHLLRRERLHRVLHILGFLPTHYDKQIDFSKRYGKFVDNTEPKIAYNERKFLFMDSFQEMLADFKIHQPDLFYTKKNGEESKIPYDWTIYYLRKKALSRKISKEELAWIILNFNQKRGYYQLREEEEENKENDFEIISSKIISVIKKDKDKKYNKYWYDIILENGLVYQAAFYNDFVYNWINQDREFIIERISLKNGTEKVKLSYLPTFDEIDKMDKKEQDKYYKKIKIKTENSIGNKTVGCYIYDHILQNPNEKIKGKLVRTIERKYYKEELKAILEKQVALQPELFTDQLFADCIRELYSKNEAQQRNLAARDFVHLFVEDIIFYQRSLRRQKSTLANCSLESRSYIDKDSHTRKEAPLKVCPKSNPYYQEFRVLQWLQNLKIYEIDTDQEVTHEFIKTLEDKQQFFDFLMNQKEIDCEELLKYFLNQTYPNAREKALKSELKKWKDTYRWNYVYDIGEKSSKKYPMNETRYELKRHLEKVANLPDDFLSSEVEYLLWHLIYSVKDKVAYEKGLKTFAQKHHLDKDSFVESFKKFKPYPSEYGSFSEKAIRKLLPLMRFGSYWDFNHIDKNTQKRIEDLITGVENEEIRTILREKAEKYQLEKETDFQDLPLWLAQYIVYNRHAEASSLEKWTSVNDLETYLNEFKQYSLRNPIVEQVVMETLRVVRDIWQQYGQGQASFFDEIHIELGRELKKTAKEREKLSKQNQKNEDINLSIKEKLKELEKYNTRAYSITHQEKYKLWLEQKHISPYTGQIISPENLFTDNYEIEHIIPQSRFFDDSLSNKVVCESIVNKAPYKDRQLGLEFIKNQGGRIVKELSTENKTIKIFTEEQYRTFIKEHYSNNPEKTKKLLLEEIPEKMVARQMNDTCYISKFISEILSKIVRSDEQDEGVHSKNVILCTGKITSALKQDWGVNDVWNDLILPRFERMNDLTQSTLFTTYNEKYQKYLPTVPMEYSNGFQKKRIDHRHHAMDAIIIACATREHINYINNQHALEKGKDKKEKQKEHDKLREKLCIKKDNKGSEENYSWIFKKPWDTFTQEVQAALEGIVVSFKQNLRVINKATNYYERWVEENGKYIKKMVKQEGTNWAIRKPLHEETISGKIYLDREEITKNDILTATRKTVDSSFDEKRIKKITDTGIQKILLNYLKYKGSPEIAFSPEGLEELNKNLSIYNDGKPHKPIYKVRIYEKGSGRFALGEKGRKYKKYVQGAPNLYFGIYQGANKRSFATIPLNEVIERQKQGRPSIPEYNEKGDPLLFSLSPNDLVYVPVEGEIIEDIDFQNLSKEQKERIYNVNDFSSTCYFTPNRIAKAIFPKEVDLQRKGDKLPGSYDTKTASLEGIQIKEVCIKLKIDRLGNISKA

SEQ ID NO: 918 - protein, 1140 aa, Catellicoccus marimammalium
MKNMTKVNVGLDVGISSAGWSVINAETNQILESGVRLFSGSDADENVNRRNQRQGRRLFRRRKLRIQEAKKYLENVFQLKDIEPKDEWNPYEIRVRALNEKVSKEELSIALLNIVKHRGISYELEDVTDEEGTNTQSFQSGLDYNRRLLKTKTVGEIQYDRLQKYGQVRGQIQTEDGLLINIFPTKNYVEEVERILETQKKYHPEIDDVFIEKIISFVTRKREYFVGPGNEKSRTDYGIYRENGETLDNLFEILIGKDKFYPEEYRAAGSSYTAQIFNLLNDLNNLRIPTTEDHHLTKAQKEEIITELKNTSRLSGGMLKLISKVTKAPKEEISGYRKDEKDKPDLHSLAYYRKQKNMLEKEGIQIADFSEELLDELATMMTLNTEPGEIRKQLNKITNQYDILTPEVIEVLVKNHTAFVATSNHKWHRFSLKLMKEFIPELLETSKEQSTILCERGFIQNRASYLDENHHFNYAELRENLYNPVVRKSTCEMLKVFTAIQEKYPNIQNVIVELPRETNEDEQKRKIKKINDNNAKRKKEILKEAQAQSGLSEEALEEKLLKTKGLYLKLMLWYEQEGKCVYSGQEIPLSDLLQNKGGYEVDHIIPISISFDDRLCNKVLVRQQLNSQKSNQTPFEYMTTHTDGHLSFHELKELVGKNKRFSKEKRELLLAEIYSNDIETRKRFINRNLVDTSYTARIVLNALQQYKKENQLSMNVSVVRGAMTNILRKKVKLDKTRETFHHHAIDASLMAVIPNIEFFKERKEWLPKSANEEVVEVEVSEEETMPEKEFKVKMRLPESFIQDVQILQRNSFAKEEVSGPQTRERNLKIKFSHQVDQKMNRKVADDTIYGTRQAQLGKDKKEETYVIGKIKDIYNYDEYVRFKKRYDKNKESFLMYHHDPQTFEKLEEILAQYPEYIEDEKGKKKKVSPFALYREENGPVTKYAKKNNGPVIKQLKYYDSKLNRKIDISHKYSTKNRQVVLQSLKPYRTDVYRNQDTGEYTLVGIDQNDGKFVNGHYGIPKSRYEEIKANNKLSEHDEFVFSLYKNSMVKVIDENGESIVVRYLSRSMPNRKNNAEIKPVEKYQFEDGEVVPVYGKCRKQMQTVFVKKGWTLLKGNTDILGNTYFVEKESENPKKMIDDK

SEQ ID NO: 919 - protein, 1419 aa, Unknown
  Chryseobacterium sp. CF314
MMIKNILGLDLGTNSIGWALIKQNFENKYGEILGMGSRIIPMSQDVLGEFGKGNSVSQTAARTGYRGVRRLRERFLLRRERLHRVLNVLNFLPEHYASQIDFEKRFGKFKYETEPKLAYNNDGFFFKNSFDEMLGDFKDHQFHLLENGRKVPYDWTIYYLRKKALSQKIEKEELAWILLNFNQKRGYYQLRGEDFEEEKDRVFVRLKVDRVVDSGENIKGKILYDVYFENGWKYEKQIVKTEDWIGRTKEFIVTESILKNGDTKRTFKAVDSEKDWIAIKTKTEQEIDKSHKTVGAYIYEALLQNPKQKIKGKLVRTIERKFYREELKKILERQKEFHPELQSDDLYNDCIRELYRNNEAHQITLSKKDFVHLLLNDLIFYQRPLRSQKSSVSNCTLEFRKYKDENGVEHAQYLKTIPKSNPYYQEFRVWQWMFNLNIYRKDDDTNVTKEFLSSTEDYETLFEFLNNRKEVDQKALLRHFKLNEKTHRWNYVEDKKYPCNETKTMISTRLEKVENYPSDFLTREMEQNIWHIIYSVNDKIEYEKALKSFAHKNNLDENSFFEAFKKFPPFKSEYGSFSEKAIKKLLPLLRLGKYWNWESIDRKSQGRIEKIITGEFDGNIKDKVREKAIHLTAENDFQGLQLWLAQYIVYGRHSEASMIGKWNSADDLEEFLKGFKQHSLRNPIVEQVITETLRVVKDIWLKYGNGAKDFFSEIHIELGREMKQTKDERVDATKRITENENTNLRIKALLAEMMNDNSVENIRPYSPMQQEILKIYEDGILKSDIEIDDDILKISKTAQPSSSDLKRYKLWLEQRYKSPYTGQIIPLNKLFTSEYEIEHIIPQSRYFDDSFSNKIICESAVNKLKDNYIGLGFIKQFGGMIVECGFGKSVEIFKAEEYEDFVKKHYANNRSKRNKLLLEEIPEKMIDRQLNDTRHISKYISGVLSNIVRQEDGTDEGVNSKNIVPGNGKITTQLKQDWGLNDVWNELILPRFERMNQLTNSTDFTSWNKNHQKFLPTVPIEFSKGFSKKRIDHRHHAMDALVIACATKDHINLLNNQSAKSDTKRYDLKRKLMKFERVVYSHSKTGEKIEKEVPKQFLKPWDNFTVDAKNKMETIIVSFKQNLRVINKATNHYEKWIEKDGIKRKELIKQEGTNWAIRKPMHKETVSGKVDLPGIKIPKGKILTATRKSLDTSFDLKTINSITDTGIQKILKNYLEFKGSSELAFSPEGIEDMNKNIEKFNDGKPHQSINKVRIFELGSKFSVGQTGNKKDKYVEAAKGTNLFFAVYEDKNGKRSYETIPLNEVIERQKQGLDSVSFKNKEDFLLCPNDLVYVPSEDELENIYNIDFKNLTTEKTGNIYKVVSFSGNQIFFIRQDIAISIVNKAEFSTLNKMERAIDGSMIKENCIKLKIDRLGNIAKI

SEQ ID NO: 920 - protein, 1065 aa, Clostridium perfringens
MNKDINYALGLDIGITSVGWAVINLDLNRIEDLGVRIFNAAENPKDGSSLALPRRLARGRRRLLRRKAYRVERVRKLIVKNNILTKEELEGLFKNKEVIDVWEARVKGLDYKLSREEWAKILINFCKRRGFKSNRKNETKDKEAGQILSSISYNIEKMKETNSRTIGEYIYNEVKNSDDSYAPLRNKFGEYKMCVSRDVLREEIHTLFEKQRELGNNFASDEIEDKYFEIFNSQRPFSNFEDLEKLVGFCTFERKKHKRAPKHCISSEEFTLYEGINKLSIIKDGEKRKLSEEERTLVVNEAFNKKEIKYTTLRKLLGLSEDELFSTLTYSIDKDISKTENTKFVSLKGYHEIKRAIEKGVSKKAWQDIENNRNLLNDIAYVLTLGKTDDEIEKQLRLRNVPEELFESLLDMSFSKFNNLSIYALEKILPFMKEGYQYNEACEKAGYNFKAIYEGVRTKKLPVIEIDEIVNPVVNRALAQTRKVINSVIDKYGSPVRINIELARDLAKNFKDRKLIEKEQKENRANLDKIRENLRELMDKEPTAVEVLKYRLWEQQRGECAYTQSQIALERLFSPGYCEIDHIIPFSRSFDDSLSNKILVLGSENQRKGNKIPYEYFGEDSERWNSFEIWVKGSYLNYKKKANLLKKKFTEEEQRDWKARNLQDTKYICRYISNFVNNRLEFKESENKQKVITVNGRATAYLRSRWGLNKVREDGDKHHALDAAVVGVTTQGMVQKISKYSKAHELYTVRKNDEFVDVETGECVDVDEYKEIRKDILPRPWRGFSEELKLRLSDNPLEELKKLPIETYNEEFIKENVKPIFVSRVPFRKISGKLFKETIYSERAFKDGYFVSKKSLVDLKRGDLDNFYNYECDKKLYDAISERMKEFNYNGKKAFESPFRKPTKSGKEGPVVRSVKIKSAAPFKDGIPMNEGLVAKEGMVRIDIYEKEGKYFVVPVYRYQLAKGIVPKRAAIAGKSELKWPIMDQTYNFKFSIFKNDLIEIKYAKKDGYFGYYDGFDRHTASLVIENHDNSDRYRGIGVKTGVVEFNKYEVDVLGNYHKVNLGGN

SEQ ID NO: 921 - protein, 1099 aa, Corynebacterium accolens
MSLSYRVGIDVGTYSLGCTAIEVDDNDQPVNILSSVSLIHDSGLDPDQQKRAVTRLASSGVARRTRRLYRRRRRRMINLEKFLTSQGWETRPFEHYSDPYLPWNARVALVNGYISDDAQRGMYLSIAFRHIANHRGWRNPYWKVSSLYSPDKPSDAFEQIRKELEESTGHKIPETVTVGQLISFAQFGKDRLRGGGKKKDEKKPQEQVNQAVISARLHQIDHAREINEICRVQKIDDALRKQILDLVFAAESPKGAQIGRVGKDPLQPKLPRALKASDAFQQYRIVALAGNLRIYRDGVSTPLDRDEKLIVFNYLINLSHKEEPSWLKVAEVLNIDRGQLHGTATMTDDGERAGAAPPVHDTNRTILGCKIKPLVHWWEGANDDERAAMLKALSNSEVEDFDSPAGAQTQAFFANLDESEQEKLDSLHLPIGRAAYSEDTLMRLTSRMLDENLDLYEARLAEFDIPKDWAPPAPRIGEPVGNPAVDRVLKGVARWLEAAADEWGAPKSVVIEHVRDGFISKSKANEIDRANNARHKRNRELFKQMQENLGIDGKLRSSDLWRYQSVQRQNCQCAYCGSPITYTTCEMDHIVPRAGEGSTNTRDNLVATCHRCNLAKKNIPFAVWAAQTNIPGVSVKEALDRTRHWSEDSGMTSKDFKKFRKNVCDRLKRTVVDEPLDARSMESVAWMANELRGRVAQRFQEENTVVNVYRGELTAEARRAAGISDKLRFIDGTGKSRLDRRHHAVDAAVVAFTQNYVAETLAIRSNKKREAQLLQAAEQWKEFTGSDAEHRAAWNAWLPKMQKLAVLLQKALDEDRIAVTSNLRLRLGNGRAHEDSIGELKTIRVGDAISVTDIDRASSEALWCALTREPDFDENNGLPENPDRRIRIHGTWYDAEDDIEVFPVGAGAIKVRGGYAELSRFHHARIYKIPGKKAPVYCMLRVYNADLIRHRHEDLFSVEIKPQTMSVRQAEPKLRKALAENTAEYLGWLVTDDELVIDTSNFNTGQIAEMQSELGQVRRWRLDGFYSPSTLRLRPLQMSAEGLREDTSIGAKKIIDRPGWLPAINKLFGEGHVTVVRRDALGRARLTSNAHLPISWKAE

SEQ ID NO: 922 - protein, 1084 aa, Corynebacterium diphtheriae
MKYHVGIDVGTFSVGLAAIEVDDAGMPIKTLSLVSHIHDSGLDPDEIKSAVTRLASSGIARRTRRLYRRKRRRLQQLDKFIQRQGWPVIELEDYSDPLYPWKVRAELAASYIADEKERGEKLSVALRHIARHRGWRNPYAKVSSLYLPDGPSDAFKAIREEIKRASGQPVPETATVGQMVTLCELGTLKLRGEGGVLSARLQQSDHAREIQEICRMQEIGQELYRKIIDVVFAAESPKGSASSRVGKDPLQPGKNRALKASDAFQRYRIAALIGNLRVWVDGEKRILSVEEKNLVFDHLVNLTPKKEPEWVTIAEILGIDRGQLIGTATMTDDGERAGARPPTHDTNRSIVNSRIAPLVDWWKTASALEQHAMVKALSNAEVDDFDSPERAKVQAFFADLDDDVHAKLDSLHLPVGRAAYSEDTLVRLTRRMLSDGVDLYTARLQEFGIEPSWTPPTPRIGEPVGNPAVDRVLKTVSRWLESATKTWGAPERVIIEHVREGFVTEKRAREMDGDMRRRAARNAKLFQEMQEKLNVQGKPSRADLWRYQSVQRQNCQCAYCGSPITFSNSEMDHIVPRAGQGSTNTRENLVAVCHRCNQSKGNTPFAIWAKNTSIEGVSVKEAVERTRHWVTDTGMRSTDFKKFTKAVVERFQRATMDEEIDARSMESVAWMANELRSRVAQHFASHGTTVRVYRGSLTAEARRASGISGKLEFLDGVGKSRLDRRHHAIDAAVIAFTSDYVAETLAVRSNLKQSQAHRQEAPQWREFTGKDAEHRATWRVWCQKMEKLSALLTEDLRDDRVVVMSNVRLRLGNGSAHEETIGKLSKVKLGSQLSVSDIDKASSEALWCALTREPDFDPKDGLPANPERHIRVNGTHVYAGDNIGLFPVSAGSIALRGGYAELGSSFHHARVYKITSGKKPAFAMLRVYTIDLLPYRNQDLFSVELKPQTMSMRQAEKKLRDALATGNAEYLGWLVVDDELVVDTSKIATDQVKAVEAELGTIRRWRVDGFFGDTRLRLRPLQMSKEGIKKESAPELSKIIDRPGWLPAVNKLFSEGNVTVVRRDSLGRVRLESTAHLPVTWKVQ

SEQ ID NO: 923 - protein, 1084 aa, Corynebacterium diphtheriae
MKYHVGIDVGTFSVGLAAIEVDDAGMPIKTLSLVSHIHDSGLDPDEIKSAVTRLASSGIARRTRRLYRRKRRRLQQLDKFIQRQGWPVIELEDYSDPLYPWKVRAELAASYIADEKERGEKLSVALRHIARHRGWRNPYAKVSSLYLPDGPSDAFKAIREEIKRASGQPVPETATVGQMVTLCELGTLKLRGEGGVLSARLQQSDHAREIQEICRMQEIGQELYRKIIDVVFAAESPKGSASSRVGKDPLQPGKNRALKASDAFQRYRIAALIGNLRVRVDGEKRILSVEEKNLVFDHLVNLAPKKEPEWVTIAEILGIDRGQLIGTATMTDDGERAGARPPTHDTNRSIVNSRIAPLVDWWKTASALEQHAMVKALSNAEVDDFDSPEGAKVQAFFADLDDDVHAKLDSLHLPVGRAAYSEDTLVRLTRRMLADGVDLYTARLQEFGIEPSWTPPAPRIGEPVGNPAVDRVLKTVSRWLESATKTWGAPERVIIEHVREGFVTEKRAREMDGDMQRRAARNAKLFQEMQEKLNVQGKPSRADLWRYQSVQRQNCQCAYCGSPITFSNSEMDHIVPRAGQGSTNTRENLVAVCHRCNQSKGNTPFAIWAKNTSIEGVSVKEAVERTRHWVTDTGMRSPDFKKFTKAVVERFQRATMDEEIDARSMESVAWMANELRSRVAQHFASHGTTVRVYRGSLTAEARRASGISGKLKFFDGVGKSRLDRRHHAIDAAVIAFTSDYVAETLAVRSNLKQSQAHRQEAPQWREFTGKDAEHRAAWRVWCQKMEKLSALLTEDLRDDRVVVMSNVRLRLGNGSAHKETIGKLSKVKLGSQLSVSDIDKASSEALWCALTREPDFDPKEGLPANPERHIRVNGTHVYAGDNIGLFPVSAGSIALRGGYAELGSSFHHARVYKITSGKKPAFAMLRVYTIDLLPYRNQDLFSVELKPQTMSMRQAEKKLRDALATGNAEYLGWLVVDDELVVDTSKIATDQVKAVEAELGTIRRWRVDGFFSPSKLRLRPLQMSKEGIKKESAPELSKIIDRPGWLPAVNKLFSDGNVTVVRRDSLGRVRLESTAHLPVTWKVQ

SEQ ID NO: 924 - protein, 1084 aa, Corynebacterium diphtheriae
MKYHVGIDVGTFSVGLAAIEVDDAGMPIKTLSLVSHIHDSGLDPDKIKSAVTRLASSGIARRTRRLYRRKRRRLQQLDKFIQRQGWPVIELEDYSDPLYPWKVRAELAASYIADEKERGEKLSVALRHIARHRGWRNPYAKVSSLYLPDEPSDAFKAIREEIKRASGQPVPETATVGQMVTLCELGTLKLRGEGGVLSARLQQSDHAREIQEICRMQEIGQELYRKIIDVVFAAESPKGSASSRVGKDPLQPGKNRALKASDAFQRYRIAALIGNLRVRVDGEKRILSVEEKNLVFDHLVNLAPKKEPEWVTIAEILGIDRGQLIGTATMTDDGERAGARPPTHDTNRSIVNSRIAPLVDWWKTASALEQHAMVKALSNAEVDDFDSPEGAKVQAFFADLDDDVHAKLDSLHLPVGRAAYSEDTLVRLTRRMLADGVDLYTARLQEFGIEPSWTPPAPRIGEPVGNPAVDRVLKTVSRWLKSATKTWGAPERVIIEHVREGFVTEKRAREMDGDMRRRAARNAKLFQEMQEKLNVQGKPSRADLWRYQSVQRQNCQCAYCGSPITFSNSEMDHIVPRAGQGSTNTRENLVAVCHRCNQSKGNTPFAIWAKNTSIEGVSVKEAVERTRHWVTDTGMRSTDFKKFTKAVVERFQRATMDEEIDARSMESVAWMANELRSRVAQHFASHGTTVRVYRGSLTAEARRASGISGKLEFLDGVGKSRLDRRHHAIDAAVIAFTSDYVAETLAVRSNLKQSQAHRQEAPQWREFTGKDAEHRAAWRVWCQKMEKLSALLTEDLRDDRVVVMSNVRLRLGNGSAHEETIGKLSKVKLGSQLSVSDIDKASSEALWCALTREPDFDPKDGLPANPERHIRVNGTHVYAGDNIGLFPVSAGSIALRGGYAELGSSFHHARVYKITSGKKPAFAMLRVYTIDLLPYRNQDLFSVELKPQTMSMRQAEKKLRDALATGNAEYLGWLVVDDELVVDTSKIATDQVKAVEAELGTIRRWRVDGFFGDTRLRLRPLQMSKEGIKKESAPELSKIIDRPGWLPAVNKLFSEGNVTVVRRDSLGRVRLESTAHLPVTWKVQ

SEQ ID NO: 925 - protein, 1084 aa, Corynebacterium diphtheriae
MKYHVGIDVGTFSVGLAAIEVDDAGMPIKTLSLVSHIHDSGLDPDKIKSAVTRLASSGIARRTRRLYRRKRRRLQQLDKFIQRQGWPVIELEDYSDPLYPWKVRAELAASYIADEKERGEKLSVALRHIARHRGWRNPYAKVSSLYLPDEPSDAFKAIREEIKRASGQPVPETATVGQMVTLCELGTLKLRGEGGVLSARLQQSDHAREIQEICRMQEIGQELYRKIIDVVFAAESPKGSASSRVGKDPLQPGKNRALKASDAFQRYRIAALIGNLRVRVDGEKRILSVEEKNLVFDHLVNLAPKKEPEWVTIAEILGIDRGQLIGTATMTDDGERAGARPPTHDTNRSIVNSRIAPLVDWWKTASALEQHAMVKALSNAEVDDFDSPEGAKVQAFFADLDDDVHAKLDSLHLPVGRAAYSEDTLVRLTRRMLADGVDLYTARLQEFGIEPSWTPPAPRIGEPVGNPAVDRVLKTVSRWLESATKTWGAPERVIIEHVREGFVTEKRAREMDGDMRRRAARNAKLFQEMQEKLNVQGKPSRADLWRYQSVQRQNCQCAYCGSPITFSNSEMDHIVPRAGQGSTNTRENLVAVCHRCNQSKGNTPFAIWAKNTSIEGVSVKEAVERTRHWVTDTGMRSTDFKKFTKAVVERFQRATMDEEIDARSMESVAWMANELRSRVAQHFASHGTTVRVYRGSLTAEARRASGISGKLEFLDGVGKSRLDRRHHAIDAAVIAFTSDYVAETLAVRSNLKQSQAHRQEAPQWREFTGKDAEHRAAWRVWCQKMEKLSALLTEDLRDDRVVVMSNVRLRLGNGSAHEETIGKLSKVKLGSQLSVSDIDKASSEALWCALTREPDFDPKDGLPANPERHIRVNGTHVYAGDNIGLFPVSAGSIALRGGYAELGSSFHHARVYKITSGKKPAFAMLRVYTIDLLPYRNQDLFSVELKPQTMSMRQAEKKLRDALATGNAEYLGWLVVDDELVVDTSKIATDQVKAVEAELGTIRRWRVDGFFGDTRLRLRPLQMSKEGIKKESAPELSKIIDRPGWLPAVNKLFSEGNVTVVRRDSLGRVRLESTAHLPVTWKVQ

SEQ ID NO: 926 - protein, 1084 aa, Corynebacterium diphtheriae
MKYHVGIDVGTFSVGLAAIEVDDAGMPIKTLSLVSHIHDSGLDPDKMKSAVTRLASSGIARRTRRLYRRKRRRLQQLDKFIQRQGWPVIELEDYSDPLYPWKVRAELAASYIADEKERGEKLSVALRHIARHRGWRNPYAKVSSLYLPDEPSDAFKSIREEIKRASGQPVPETATVGQMVTLCELGTLKLRGEGGVLSARLQQSDHAREIQEICRMQEIGQELYRKIIDVVFAAESPKGSASSRVGKDPLQPGKNRALKASDSFQRYRIAALISNLRVRVDGEKRILSVEEKNLVFDHLVNLAPKKEPEWVTIAEILGIDRGQLIGTATMTDDGERAGARPPTHDTNRSIVNSRIAPLVDWWKTASALEQHAMVKALSNAEVDDFDSPEGAKVQAFFADLDDDVHAKLDSLHLPVGRAAYSEDTLVRLTRRMLADGVDLYTARLQEFGIEPSWTPPAPRIGEPVGNPAVDRVLKTVSRWLESATKTWGAPERVIIEHVRDGFVTEKRAREMDGDMRRRAARNAKLFQEMQEKLNVQGKPSRADLWRYQSVQRQNCQCAYCGSPITFSNSEMDHIVPRAGQGSTNTRENLVAVCHRCNQSKGNTPFAIWAKNTSIEGVSVKEAVERTRHWVTDTGMRSTDFKKFTKAVVERFQRATMDEEIDARSMESVAWMANELRSRVAQHFASHGTTVRVYRGSLTAEARRASGISGKLEFLDGVGKSRLDRRHHAIDAAVIAFTSDYVAETLAVRSNLKQSQAHRQEAPQWREFTGKDAEHRAAWRVWCQKMEKLSALLTEDLRDDRVVVMSNVRLRLGNGSAHEETIGKLSKVKLGSQLSVSDIDKASSEALWCALTREPDFDPKDGLPANPERHIRVNGTHVYAGDNIGLFPVSAGSIALRGGYAELGSSFHHARVYKITSGKKPAFAMLRVYTIDLLPYRNQDLFSVELKPQTMSMRQAEKKLRDALATGNAEYLGWLVVDDELVVDTSKIATDQVKAVEAELGTIRRWRVDGFFGDTRLRLRPLQMSKEGIKKELAPELSKIIDRPGWLPAVNKLFSEGNVTVVRRDSLGRVRLESTAHLPVTWKVQ

SEQ ID NO: 927 - protein, 1084 aa, Corynebacterium diphtheriae
MKYHVGIDVGTFSVGLAAIEVDDAGMPIKTLSLVSHIHDSGLDPDKMKSAVTRLASSGIARRTRRLYRRKRRRLQQLDKFIQRQGWPVIELEDYSDPLYPWKVRAELAASYIADEKERGEKLSVALRHIARHRGWRNPYAKVSSLYLPDEPSDAFKSIREEIKRASGQPVPETATVGQMVTLCELGTLKLRGEGGVLSARLQQSDHAREIQEICRMQEIGQELYRKIIDVVFAAESPKGSASSRVGKDPLQPGKNRALKASDAFQRYRIAALIGNLRVRVDGEKRILSVEEKNLVFDHLVNLAPKKEPEWVTIAEILGIDRGQLIGTATMTDDGERAGARPPTHDTNRSIVNSRIAPLVDWWKTASALEQHAMVKALSNAEVDDFDSPEGAKVQAFFADLDDDVHAKLDSLHLPVGRAAYSEDTLVRLTRRMLADGVDLYTARLQEFGIEPSWTPPAPRIGEPVGNPAVDRVLKTVSRWLESATKTWGAPERVIIEHVREGFVTEKRAREMDGDMRRRAARNAKLFQEMQEKLNVQGKPSRADLWRYQSVQRQNCQCAYCGSPITFSNSEMDHIVPRAGQGSTNTRENLVAVCHRCNQSKGNTPFAIWAKNTSIEGVSVKEAVERTRHWVTDTGMRSTDFKKFTKAVVERFQRATMDEEIDARSMESVAWMANELRSRVAQHFASHGTTVRVYRGSLTAEARRASGISGKLEFLDGVGKSRLDRRHHAIDAAVIAFTSDYVAETLAVRSNLKQSQAHRQEAPQWREFTGKDAEHRAAWRVWCQKMEKLSALLTEDLRDDRVVVMSNVRLRLGNGSAHEETIGKLSKVKLGSQLSVSDIDKASSEALWCALTREPDFDPKDGLPANPERHIRVNGTHVYAGDNIGLFPVSAGSIALRGGYAELGSSFHHARVYKITSGKKPAFAMLRVYTIDLLPYRNQDLFSVELKPQTMSMRQAEKKLRDALATGNAEYLGWLVVDDELVVDTSKIATDQVKAVEAELGTIRRWRVDGFFGDTRLRLRPLQMSKEGIKKESAPELSKIIDRPGWLPAVNKLFSEGNVTVVRRDSLGRVRLESTAHLPVTWKVQ

SEQ ID NO: 928 - protein, 1084 aa, Corynebacterium diphtheriae
MKYHVGIDVGTFSVGLAAIEVDDAGMPIKTLSLVSHIHDSRLDPDKIKSAVTRLASSGIARRTRRLYRRKRRRLQQLDKFIQRQGWPVIELEDYSDPLYPWKVRAELAASYIADEKERGEKLSVALRHIARHRGWRNPYAKVSSLYLPDEPSDAFKAIREEIKRASGQPVPETATVGQMVTLCELGTLKLRGEGGVLSARLQQSDHAREIQEICRMQEIGQELYRKIIDVVFAAESPKGSASSRVGKDPLQPGKNRALKASDAFQRYRIAALIGNLRVRVDGEKRILSVEEKNLVFDHLVNLAPKKEPEWVTIAEILGIDRGQLIGTATMTDDGERAGARPPTHDTNRSIVNSRIAPLVDWWKTASALEQHAMVKALSNAEVDDFDSPEGAKVQAFFADLDDDVHAKLDSLHLPVGRAAYSEDTLVRLTRRMLADGVDLYTARLQEFGIEPSWTPPAPRIGEPVGNPAVDRVLKTVSRWLESATKTWGAPERVIIEHVREGFVTEKRAREMDGDMRRRAARNAKLFQEMQEKLNIQGKPSRADLWRYQSVQRQNCQCAYCGSPITFSNSEMDHIVPRAGQGSTNTRENLVAVCHRCNQSKGNTPFAIWAKNTSIEGVSVKEAVERTRHWVTDTGMRSTDFKKFTKAVVERFQRVTMDEEIDARSMESVAWMANELRSRVAQHFASRGTTVRVYRGSLTAEARRASGISGKLEFLDGVGKSRLDRRHHAIDAAVIAFTSDYVAETLAVRSNLKQSQAHRQEAPQWREFTGKDAEHRAAWRVWCQKMEKLSALLTEDLRDDRVVVMSNVRLRLGNGSAHEETIGKLSKVKLGSQLSVSDIDKASSEALWCALTREPDFDPKDGLPANPERHIRVNGTHVYAGDNIGLFPVSAGSIALRGGYAELGSSFHHARVYKITSGKKPAFAMLRVYTIDLLPYRNQDLFSVELKPQTMSMRQAEKKLRDALATGNAEYLGWLVVDDELVVDTSKIATDQVKAVEAELGTIRRWRVDGFFGDTRLRLRPLQMSKEGIKKESAPELSKIIDRPGWLPAVNKLFSEGNVTVVRRDSLGRVRLESTAHLPVTWKVQ

SEQ ID NO: 929 - protein, 1069 aa, Corynebacterium matruchotii
MAAIAIDDDGKPTEILSAISLIHDSGVDPDSAKSAATRLATSGIARRTRRLYRRKRKRLAKLDKFISSQGWPLKEFEKYEDPFYPWRVRAELATTAITDQQELGEKLSIALRHIARHRGWRNPYSKVTALYTVTEPSDAFLAMQEECAKQLGRTIPETITVGQLVTGMNLGKTRLRGENSLLAARPRQSDNANEIHTIAKVQGLSNELVRQIIDHVFAAESPKGSAAEQVGKDPLQPTKKRALKASDAFQQYRIAALIGNLRIRGGKGNRRLTTEETRLVFDYLRSLPAKQEPTWQLVAEQLKIDRGNLVGTAIMTDDGERAGAKPPVHDTNRIMENTKIKPLATWWKSADADARAAMVKALSNAEVDDFDSQAGAQVQEFFFGISDEDQEKLDGLHLPIGRAAYSEDTLDRLTKRMIGEGMDLYEARQAEFKISNDWAPPAPEIGERVGNPAVDRVLKATARWLNAAERQWGAPKSVNIEHVRAAFMSESSARELDRDNQQRAKRNVKVVAEMQEKLGIEGRPSRADVWRFQSIQRQNGKCAYCGAEISFKNSEMDHIIPQVGEGSTNTRDNLVAVCRECNSSKSNIAFAVWAENTSRPGVSVQKAIERTHHWVTDSGLRKPEFDKFRKQVCDRLRRKATDEPIDARSLESVAWMANELRSRIAQKFKDGDTKVRVYKGALTAEARRASGISGKLEFVDGKGKSRLDRRHHAVDAAVVAFTSNYVAETLALRSNMKFDQELRRKAPQWREFTGSDHVHQVEWTKWKYRMQALAELLNNALVQDRIVVMHNLRLRLGNGAAHEDTIGKLTRLKVGDAISTTDIDRASSEALWCALTRDPDYDPKTGLPENPNRTIRIHGTHLTASDEITVFPVAAASIPIRDGFAKLGSNYHHVRLFRVPSGKKYKYCLMQVYTVDLLKFRKEDLFTVELKPQTISVRTCEALLRKALANGTAEYLGWLVSDDELLIDTSSFDTPGIVKLREEYGPVNRWRLAGLTSVTRLNLRPLYLSKEGLKPNVNPEIKKIIDNRSWIITVNKLFSSGHVKIIRRDALGRPRLHSAAHLPICWEVK

SEQ ID NO: 930 - protein, 210 aa, Diplosphaera colitermitum
MSDILDKPIVLSLNRAWQVIGHRTVKQALVALNGGNADLPPALGLDIAYPKFDDGAWNFDRPLFLNPLPWSEWIELPVRDFDFAITTPRLRIRVPTVIVATQFAKMPVRIPRLTREAIFERDGGVCQYTGEHVGKHGGNLDHVVPRDRGGRDSFENLVWAKREINSLKANRLPHEAGLRLLRRPKAPAPLPASMTIREARHPDWRHFLTP

SEQ ID NO: 931 - protein, 1332 aa, Dolosigranulum pigrum
MQKNYTIGLDIGTNSVGWAVMKDDYTLIRKRMKVLGNTDIKKIKKNFWGVRLFDEGETAKETRLKRGTRRRYQRRRNRLIYLQDIFQQPMLAIDENFFHRLDDSFFVPDDKSYDRHPIFGSLEEEVAYHNTYPTIYHLRKHLADNPEKADLRLVYTALAHIVKYRGHFLIEGELNTENTSISETFEQFLDTYSDIFKEQLVGDISKVEEILSSKQSRSRKHEQIMALFPNENKLGNFGRFMMLIVGNTSNFKPVFDLDDEYKLKLSDETYEEDLDTLLGMTDDVFLDVFMAAKNVYDAVEMSAIISTDTGNSKAVLSNQMINFYDEHKVDLAQLKQFFKTHLPDKYYECFSDPSKNGYAGYIDGKTNQEDFYKYIEKVMKTIKSDKKDYFLDKIDREVFLRKQRSFYNSVIPHQIHLQEMQAILDRQSQYYPFLAENRDKIESLVTFRIPYYVGPLTVSDQSEFAWMERQSDEPIRPWNFDEIVNKERSAEKFIERMTNMDTYLLEEKVLPKRSLLYQTFEVYNELTKVRYTNEQGKTEKLNRQQKAEIIETLFKQKNRVREKDIANYLEQYGYVDGTDIKGVEDKFNASLSTYNDLAKIDGAKAYLDDPEYADVWEDIIKILTIFEDKAMRKKQLQTYSDTLSPEILKKLERKHYTGWGRFSKKLINGLRDEGSNKTILDYLKSDEGSSGPTNRNFMQLIRDNTLSFKKKIEDAQTIEDTTHIYDTVAELPGSPAIKKGIRQALKIVEEIIDIIGYEPENIVVEMARESQTTKKGKDLSKERLEKLTEAIKEFDGPSDVKVKDLKNENLRNDRLYLYYLQNGRDMYTNEPLDINNLSKYDIDHIIPQSFTTDNSIDNKVLVSRTKNQGNKSDDVPSINIVHKMKPFWRQLHKAGLISDRKFKNLTKAEHGGLTEADRAHFLNRQLVETRQITKHVANLLDSQYNTAEEQRINIVLLKSSMTSRFRKEFKLYKVREINDYHHGHDAYLNAVVATTIMKVYPNLKPQFVYGQYKKTSMFKEEKATARKHFYSNITKFFKKEKVVNEETGEILWDTERHLSTIKRVLSWKQMNIVKKVEKQKGQLWKETIYPKGDSSKLIPVKEGMDPQKYGGLSQVSEAFAVVITHEKGKKKQLKSDLISIPIVDQKAYEQHPTAYLEEAGYNNPTVLHELFKYQLFELEDGSRRMIASAKEFQKGNQMVLPLELVELLYHANRYDKVKFPDSIEYVHDNLAKFDDLLEYVIDFSNKYINADKNVQKIQKIYKEHGTEDVELTVESFVNLMTFTAMGAPATFKFYGESITRSRYTSITEFRGSTLIFQSITGLYETRYKLEDN

SEQ ID NO: 932 - protein, 921 aa, Enterococcus faecalis
MIPHQIHLAELQAIIHRQAAYYPFLKENQEKIEQLVTFRIPYYVGPLSKGDASTFAWLKRQSEEPIRPWNLQETVDLDQSATAFIERMTNFDTYLPSEKVLPKHSLLYEKFMVFNELTKISYTDDRGIKANFSGKEKEKIFDYLFKTRRKVKKKDIIQFYRNEYNTEIVTLSGLEEDQFNASFSTYQDLLKCGLTRAELDHPDNAEKLEDIIKILTIFEDRQRIRTQLSTFKGQFSAEVLKKLERKHYTGWGRLSKKLINGIYDKESGKTILGYLIKDDGVSKHYNRNFMQLINDSQLSFKNAIQKAQSSEHEETLSETVNELAGSPAIKKGIYQSLKIVDELVAIMGYAPKRIVVEMARENQTTSTGKRRSIQRLKIVEKAMAEIGSNLLKEQPTTNEQLRDTRLFLYYMQNGKDMYTGDELSLHRLSHYDIDHIIPQSFMKDDSLDNLVLVGSTENRGKSDDVPSKEVVKDMKAYWEKLYAAGLISQRKFQRLTKGEQGGLTLEDKAHFIQRQLVETRQITKNVAGILDQRYNANSKEKKVQIITLKASLTSQFRSIFGLYKVREVNDYHHGQDAYLNCVVATTLLKVYPNLAPEFVYGEYPKFQTFKENKATAKAIIYTNLLRFFTEDEPRFTKDGEILWSNSYLKTIKKELNYHQMNIVKKVEVQKGGFSKESIKPKGPSNKLIPVKNGLDPQKYGGFDSPIVAYTVLFTHEKGKKPLIKQEILGITIMEKTRFEQNRILFLEEKGFLRPRVLMKLPKYTLYEFPEGRRRLLASAKEAQKGNQMVLPEHLLTLLYHAKQCLLPNQSESLTYVEQHQPEFQEILERVVDFAEVHTLAKSKVQQIVKLFEANQTADVKEIAASFIQLMQFNAMGAPSTFKFFQKDIERARYTSIKEIFDATIIYQSTTGLYETRRKVVD

SEQ ID NO: 933 - protein, 1337 aa, Enterococcus faecalis; identical to SEQ ID NO: 110

SEQ ID NO: 934 - protein, 1337 aa, Enterococcus faecalis
MKKDYVIGLDIGTNSVGWAVMTEDYQLVKKKMPIYGNTEKKKIKKNFWGVRLFEEGHTAEDRRLKRTARRRISRRRNRLRYLQAFFEEAMTALDENFFARLQESFLVPEDKKWHRHPIFAKLEDEVAYHETYPTIYHLRKKLADSSEQADLRLIYLALAHIVKYRGHFLIEGKLSTENISVKEQFQQFMIIYNQTFVNGESRLVSAPLPESVLIEEELTEKASRTKKSEKVLQQFPQEKANGLFGQFLKLMVGNKADFKKVFGLEEEAKITYASESYEEDLEGILAKVGDEYSDVFLAAKNVYDAVELSTILADSDKKSHAKLSSSMIVRFTEHQEDLKNFKRFIRENCPDEYDNLFKNEQKDGYAGYITHAGKVSQLKFYQYVKKIIQDIAGAEYFLEKIAQENFLRKQRTFDNGVIPHQIHLAELQAIIHRQAAYYPFLKENQEKIEQLVTFRIPYYVGPLSKGDANTFAWLKRQSEEPIRPWNLQETVDLDQSATAFIERMTNFDTYLPSEKVLPKHSLLYEKFMVFNELTKISYTDDRGIKANFSGKEKEKIFDYLFKTRRKVKKKDIIQFYRNEYNTEIVTLSGLEEDQFNASFSTYQDLLKCGLTRAELDHPDNAEKLEDIIKILTIFEDRQRIRTQLSTFKGQFSAEVLKKLERKHYTGWGRLSKKLINGIYDKESGKTILDYLIKDDGVSKHYNRNFMQLINDSQLSFKNAIQKAQSSEHEETLSETVNELAGSPAIKKGIYQSLKIVDELVAIMGYAPKRIVVEMARENQTTSTGKRRSIQRLKIVEKAMAEIGSNLLKEQPTTNEQLRDTRLFLYYMQNGKDMYTGDELSLHRLSHYDIDHIIPQSFMKDDSLDNLVLVGSTENRGKSDDVPSKEVVKDMKAYWEKLYAAGLISQRKFQRLTKGEQGGLTLEDKAHFIQRQLVETRQITKNVAGILDQRYNAKSKEKKVQIITLKASLTSQFRSIFGLYKVREVNDYHHGQDAYLNCVVATTLLKVYPNLAPEFVYGEYPKFQTFKENKATAKAIIYTNLLRFFTEDEPRFTKDGEILWSNSYLKTIKKELNYHQMNIVKKVEVQKGGFSKESIKPKGPSNKLIPVKNGLDPQKYGGFDSPIVAYTVLFTHEKGKKPLIKQEILGITIMEKTRFEQNPILFLEEKGFLRPRVLMKLPKYTLYQFPEGRRRLLASAKEAQKGNQMVLPEHLLTLLYHAKQCLLPNQSESLAYVEQHQPEFQEILERVVDFAEVHTLAKSKVQQIVKLFEANQTADVKEIAASFIQLMQFNAMGAPSTFKFFQKDIERARYTSIKEIFDATIIYQSTTGLYETRRKVVD

SEQ ID NO: 935 - protein, 1337 aa, Enterococcus faecalis
MKKDYVIGLDIGTNSVGWAVMTEDYQLVKKKMPIYGNTEKKKIKKNFWGVRLFEEGHTAEDRRLKRTARRRISRRRNRLRYLQAFFEEAMTALDENFFARLQESFLVPEDKKWHRHPIFAKLEDEVAYHETYPTIYHLRKKLADSSEQADLRLIYLALAHIVKYRGHFLIEGKLSTENISVKEQFQQFMIIYNQTFVNGESRLVSTPLPESVLIEEELTEKASRTKKSEKVLQQFPQEKANGLFGQFLKLMVGNKADFKKVFGLEEEAKITYASESYEEDLEGILAKVGDEYSDVFLAAKNVYDAVELSTILADSDKKSHAKLSSSMIVRFTEHQEDLKNFKRFIRENCPDEYDNLFKNEQKDGYAGYITHAGKVSQLKFYQYVKKIIQDIAGAEYFLEKIAQENFLRKQRTFDNGVIPHQIHLAELQAIIHRQAAYYPFLKENQEKIEQLVTFRIPYYVGPLSKGDASTFAWLKRQSEEPIRPWNLQETVDLDQSATAFIERMTNFDTYLPSEKVLPKHSLLYEKFMVFNELTKISYTDDRGIKANFSGKEKEKIFDYLFKTRRKVKKKDIIQFYRNEYNTEIVTLSGLEEDQFNASFSTYQDLLKCGLTRAELDHPDNAEKLEDIIKILTIFEDRQRIRTQLSTFKGQFSAEVLKKLERKHYTGWGRLSKKLINGIYDKESGKTILDYLVKDDGVSKHYNRNFMQLINDSQLSFKNAIQKAQSSEHEETLSETVNELAGSPAIKKGIYQSLKIVDELVAIMGYAPKRIVVEMARENQTTSTGKRRSIQRLKIVEKAMAEIGSNLLKEQPTTNEQLRDTRLFLYYMQNGKDMYTGDELSLHRLSHYDIDHIIPQSFMKDDSLDNLVLVGSTENRGKSDDVPSKEVVKDMKAYWEKLYAAGLISQRKFQRLTKGEQGGLTLEDKAHFIQRQLVETRQITKNVAGILDQRYNAKSKEKKVQIITLKASLTSQFRSIFGLYKVREVNDYHHGQDAYLNCVVATTLLKVYPNLAPEFVYGEYPKFQTFKENKATAKAIIYTNLLRFFTEDEPRFTKDGEILWSNSYLKTIKKELNYHQMNIVKKVEVQKGGFSKESIKPKGPSNKLIPVKNGLDPQKYGGFDSPIVAYTVLFTHEKGKKPLIKQEILGITIMEKTRFEQNPILFLEEKGFLRPRVLMKLPKYTLYEFPEGRRRLLASAKEAQKGNQMVLPEHLLTLLYHAKQCLLPNQSESLAYVEQHQPEFQEILERVVDFAEVHTLAKSKVQQIVKLFEANQTADVKEIAASFIQLMQFNAMGAPSTFKFFQKDIERARYTSIKEIFDATIIYQSTTGLYETRRKVVD

SEQ ID NO: 936 - protein, 1337 aa, Enterococcus faecalis
MKKDYVIGLDIGTNSVGWAVMTEDYQLVKKKMPIYGNTEKKKIKKNFWGVRLFEEGHTAEDRRLKRTARRRISRRRNRLRYLQAFFEEAMTDLDENFFARLQESFLVPEDKKWHRHPIFAKLEDEVAYHETYPTIYHLRKKLADSSEQADLRLIYLALAHIVKYRGHFLIEGKLSTENISVKEQFQQFMIIYNQTFVNGESRLVSAPLPESVLIEEELTEKASRTKKSEKVLQQFPQEKANGLFGQFLKLMVGNKADFKKVFGLEEEAKITYASESYEEDLEGILAKVGDEYSDVFLAAKNVYDAVELSTILADSDKKSHAKLSSSMIVRFTEHQEDLKKFKRFIRENCPDEYDNLFKNEQKDGYAGYIAHAGKVSQLKFYQYVKKIIQDIAGAEYFLEKIAQENFLRKQRTFDNGVIPHQIHLAELQAIIHRQAAYYPFLKENQEKIEQLVTFRIPYYVGPLSKGDASTFAWLKRQSEEPIRPWNLQETVDLDQSATAFIERMTNFDTYLPSEKVLPKHSLLYEKFMVFNELTKISYTDDRGIKANFSGKEKEKIFDYLFKTRRKVKKKDIIQFYRNEYNTEIVTLSGLEEDQFNASFSTYQDLLKCGLTRAELDHPDNAEKLEDIIKILTIFEDRQRIRTQLSTFKGQFSAEVLKKLERKHYTGWGRLSKKLINGIYDKESGKTILGYLIKDDGVSKHYNRNFMQLINDSQLSFKNAIQKAQSSEHEETLSETVNELAGSPAIKKGIYQSLKIVDELVAIMGYAPKRIVVEMARENQTTSTGKRRSIQRLKIVEKAMAEIGSNLLKEQPTTNEQLRDTRLFLYYMQNGKDMYTGDELSLHRLSHYDIDHIIPQSFMKDDSLDNLVLVGSTENRGKSDDVPSKEVVKDMKAYWEKLYAAGLISQRKFQRLTKGEQGGLTLEDKAHFIQRQLVETRQITKNVAGILDQRYNANSKEKKVQIITLKASLTSQFRSIFGLYKVREVNDYHHGQDAYLNCVVATTLLKVYPNLAPEFVYGEYPKFQTFKENKATAKAIIYTNLLRFFTEDEPRFTKDGEILWSNSYLKTIKKELNYHQMNIVKKVEVQKGGFSKESIKPKGPSNKLIPVKNGLDPQKYGGFDSPIVAYTVLFTHEKGKKPLIKQEILGITIMEKTRFEQNPILFLEEKGFLRPRVLMKLPKYTLYEFPEGRRRLLASAKEAQKGNQMVLPEHLLTLLYHAKQCLLPNQSESLAYVEQHQPEFQEILERVVDFAEVHTLAKSKVQQIVKLFEANQTADVKEIAASFIQLMQFNAMGAPSTFKFFQKDIERARYTSIKEIFDATIIYQSTTGLYETRRKVVD

SEQ ID NO: 937 - protein, 936 aa, Enterococcus faecalis
MKKDYVIGLDIGTNSVGWAVMTEDYQLVKKKMPIYGNTEKKKIKKNFWGVRLFEEGHTAEDRRLKRTARRRISRRRNRLRYLQAFFEEAMTDLDENFFARLQESFLVPEDKKWHRHPIFAKLEDEVAYHETYPTIYHLRKKLADSSEQADLRLIYLALAHIVKYRGHFLIEGKLSTENISVKEQFQQFMIIYNQTFVNGESRLVSAPLPESVLIEEELTEKASRTKKSEKVLQQFPQEKANGLFGQFLKLMVGNKADFKKVFGLEEEAKITYASESYEEDLEGILAKVGDEYSDVFLAAKNVYDAVELSTILADSDKKSHAKLSSSMIVRFTEHQEDLKKFKRFIRENCPDEYDNLFKNEQKDGYAGYIAHAGKVSQLKFYQYVKKIIQDIAGAEYFLEKIAQENFLRKQRTFDNGVIPHQIHLAELQAIIHRQAAYYPFLKENQEKIEQLVTFRIPYYVGPLSKGDASTFAWLKRQSEEPIRPWNLQETVDLDQSATAFIERMTNFDTYLPSEKVLPKHSLLYEKFMVFNELTKISYTDDRGIKANFSGKEKEKIFDYLFKTRRKVKKKDIIQFYRNEYNTEIVTLSGLEEDQFNASFSTYQDLLKCGLTRAELDHPDNAEKLEDIIKILTIFEDRQRIRTQLSTFKGQFSAEVLKKLERKHYTGWGRLSKKLINGIYDKESGKTILGYLIKDDGVSKHYNRNFMQLINDSQLSFKNAIQKAQSSEHEETLSETVNELAGSPAIKKGIYQSLKIVDELVAIMGYAPKRIVVEMARENQTTSTGKRRSIQRLKIVEKAMAEIGSNLLKEQPTTNEQLRDTRLFLYYMQNGKDMYTGDELSLHRLSHYDIDHIIPQSFMKDDSLDNLVLVGSTENRGKSDDVPSKEVVKDMKAYWEKLYAAGLISQRKFQRLTKGEQGGLTLEDKAHFIQRQLVETR

SEQ ID NO: 938 - protein, 1337 aa, Enterococcus faecalis
MKKDYVIGLDIGTNSVGWAVMTEDYQLVKKKMPIYGNTEKKKIKKNFWGVRLFEEGHTAEDRRLKRTARRRISRRRNRLRYLQAFFEEAMTDLDENFFARLQESFLVPEDKKWHRHPIFAKLEDEVAYHETYPTIYHLRKKLADSSEQADLRLIYLALAHIVKYRGHFLIEGKLSTENISVKEQFQQFMIIYNQTFVNGESRLVSAPLPESVLIEEELTEKASRTKKSEKVLQQFPQEKANGLFGQFLKLMVGNKADFKKVFGLEEEAKITYASESYEEDLEGILAKVGDEYSDVFLAAKNVYDAVELSTILADSDKKSHAKLSSSMIVRFTEHQEDLKKFKRFIRENCPDEYDNLFKNEQKDGYAGYIAHAGKVSQLKFYQYVKKIIQDIAGAEYFLEKIAQENFLRKQRTFDNGVIPHQIHLAELQAIIHRQAAYYPFLKENQEKIEQLVTFRIPYYVGPLSKGDASTFAWLKRQSEEPIRPWNLQETVDLDQSATAFIERMTNFDTYLPSEKVLPKHSLLYEKFMVFNELTKISYTDDRGIKANFSGKEKEKIFDYLFKTRRKVKKKDIIQFYRNEYNTEIVTLSGLEEDQFNASFSTYQDLLKCGLTRAELDHPDNAEKLEDIIKILTIFEDRQRIRTQLSTFKGQFSAEVLKKLERKHYTGWGRLSKKLINGIYDKESGKTILDYLVKDDGVSKHYNRNFMQLINDSQLSFKNAIQKAQSSEHEETLSETVNELAGSPAIKKGIYQSLKIVDELVAIMGYAPKRIVVEMARENQTTSTGKRRSIQRLKIVEKAMAEIGSNLLKEQPTTNEQLRDTRLFLYYMQNGKDMYTGDELSLHRLSHYDIDHIIPQSFMKDDSLDNLVLVGSTENRGKSDDVPSKEVVKDMKAYWEKLYAAGLISQRKFQRLTKGEQGGLTLEDKAHFIQRQLVETRQITKNVAGILNQRYNANSKEKKVQIITLKASLTSQFRSIFGLYKVREVNDYHHGQDAYLNCVVATTLLKVYPNLAPEFVYGEYPKFQTFKENKATAKAIIYTNLLRFFTEDEPRFTKDGEILWSNSYLKTIKKELNYHQMNIVKKVEVQKGGFSKESIKPKGPSNKLIPVKNGLDPQKYGGFDSPVVAYTVLFTHEKGKKPLIKQEILGITIMEKTRFEQNPILFLEEKGFLRPRVLMKLPKYTLYEFPEGRRRLLASAKEAQKGNQMVLPEHLLTLLYHAKQCLLPNQSESLAYVEQHQPEFQEILERVVDFAEVHTLAKSKVQQIVKLFEANQTADVKEIAASFIQLMQFNAMGAPSTFKFFQKDIERARYTSIKEIFDATIIYQSTTGLYETRRKVVD

SEQ ID NO: 939 - protein, 1337 aa, Enterococcus faecalis
MKKDYVIGLDIGTNSVGWAVMTEDYQLVKKKMPIYGNTEKKKIKKNFWGVRLFEEGHTAEDRRLKRTARRRISRRRNRLRYLQAFFEEAMTDLDENFFARLQESFLVPEDKKWHRHPIFAKLEDEVAYHETYPTIYHLRKKLADSSEQADLRLIYLALAHIVKYRGHFLIEGKLSTENISVKEQFQQFMIIYNQTFVNGESRLVSAPLPESVLIEEELTEKASRTKKSEKVLQQFPQEKANGLFGQFLKLMVGNKADFKKVFGLEEEAKITYASESYEEDLEGILAKVGDEYSDVFLAAKNVYDAVELSTILADSDKKSHAKLSSSMIVRFTEHQEDLKKFKRFIRENCPDEYDNLFKNEQKDGYAGYIAHAGKVSQLKFYQYVKKIIQDIAGAEYFLEKIAQENFLRKQRTFDNGVIPHQIHLAELQAIIHRQAAYYPFLKENQEKIEQLVTFRIPYYVGPLSKGDASTFAWLKRQSEEPIRPWNLQETVDLDQSATAFIERMTNFDTYLPSEKVLPKHSLLYEKFMVFNELTKISYTDDRGIKANFSGKEKEKIFDYLFKTRRKVKKKDIIQFYRNEYNTEIVTLSGLEEDQFNASFSTYQDLLKCGLTRAELDHPDNAEKLEDIIKILTIFEDRQRIRTQLSTFKGQFSAEVLKKLERKHYTGWGRLSKKLINGIYDKESGKTILGYLIKDDGVSKHYNRNFMQLINDSQLSFKNAIQKAQSSEHEETLSETVNELAGSPAIKKGIYQSLKIVDELVAIMGYAPKRIVVEMARENQTTSTGKRRSIQRLKIVEKAMAEIGSNLLKEQPTTNEQLRDTRLFLYYMQNGKDMYTGDELSLHRLSHYDIDHIIPQSFMKDDSLDNLVLVGSTENLGKSDDVPSKEVVKDMKAYWEKLYAAGLISQRKFQRLTKGEQGGLTLEDKAHFIQRQLVETRQITKNVAGILDQRYNANSKEKKVQIITLKASLTSQFRSIFGLYKVREVNDYHHGQDAYLNCVVATTLLKVYPNLAPEFVYGEYPKFQTFKENKATAKAIIYTNLLRFFTEDEPRFTKDGEILWSNSYLKTIKKELNYHQMNIVKKVEVQKGGFSKESIKPKGPSNKLIPVKNGLDPQKYGGFDSPIVAYTVLFTHEKGKKPLIKQEILGITIMEKTRFEQNPILFLEEKGFLRPRVLMKLPKYTLYEFPEGRRRLLASAKEAQKGNQMVLPEHLLTLLYHAKQCLLPNQSESLAYVEQHQPEFQEILERVVDFAEVHTLAKSKVQQIVKLFEANQTADVKEIAASFIQLMQFNAMGAPSTFKFFQKDIERARYTSIKEIFDATIIYQSTTGLYETRRKVVD

SEQ ID NO: 940 - protein, 1337 aa, Enterococcus faecalis
MKKDYVIGLDIGTNSVGWAVMTEDYQLVKKKMPIYGNTEKKKIKKNFWGVRLFEEGHTAEDRRLKRTARRRISRRRNRLRYLQAFFEEAMTDLDENFFARLQESFLVPEDKKWHRHPIFAKLEDEVAYHETYPTIYHLRKKLADSSEQADLRLIYLALAHIVKYRGHFLIEGKLSTENTSVKEQFQQFMVIYNQTFVNGESRLVSAPLPESVLIEEELTEKASRTKKSEKVLQQFPQEKANGLFGQFLKLMVGNKADFKKVFGLEEEAKITYASESYEEDLEGILAKVGDEYSDVFLAAKNVYDAVELSTILADSDKKSHAKLSSSMIVRFTEHQEDLKKFKRFIRENCPDEYDNLFKNEQKDGYAGYIAHAGKVSQLKFYQYVKKIIQDIAGAEYFLEKIAQENFLRKQRTFDNGVIPHQIHLAELQAIIHRQAAYYPFLKENQEKIEQLVTFRIPYYVGPLSKGDASTFAWLKRQSEEPIRPWNLQETVDLDQSATAFIERMTNFDTYLPSEKVLPKHSLLYEKFMVFNELTKISYTDDRGIKANFSGKEKEKIFDYLFKTRRKVKKKDIIQFYRNEYNTEIVTLSGLEEDQFNASFSTYQDLLKCGLTRAELDHPDNAEKLEDIIKILTIFEDRQRIRTQLSTFKGQFSAEVLKKLERKHYTGWGRLSKKLINGIYDKESGKTILDYLVKDDGVSKHYNRNFMQLINDSQLSFKNAIQKAQSSEHEETLSETVNELAGSPAIKKGIYQSLKIVDELVAIMGYAPKRIVVEMARENQTTSTGKRRSIQRLKIVEKAMAEIGSNLLKEQPTTNEQLRDTRLFLYYMQNGKDMYTGDELSLHRLSHYDIDHIIPQSFMKDDSLDNLVLVGSTENRGKSDDVPSKKVVKKMKAYWEKLYAAGLISQRKFQRLTKGEQGGLTLEDKAHFIQRQLVETRQITKNVAGILDQRYNAKSKEKKVQIITLKASLTSQFRSIFGLYKVREVNDYHHGQDAYLNCVVATTLLKVYPNLAPEFVYGEYPKFQAFKENKATAKTIIYTNLMRFFTEDEPRFTKDSEILWSNSYLKTIKKELNYHQMNIVKKVEVQKGGFSKESIKPKGPSNKLIPVKNGLDPQKYGGFDSPVVAYTVLFTHEKGKKPLIKQEILGITIMEKTRFEQNPILFLEEKGFLRPRVLMKLPKYTLYEFPEGRRRLLASAKEAQKGNQMVLPEHLLTLLYHAKQCLLPNQSESLAYVEQHQPEFQEILERVVDFAEVHTLAKSKVQQIVKLFEANQTADVKEIAASFIQLMQFNAMGAPSTFKFFQKDIERARYTSIKEIFDATIIYQSTTGLYETRRKVVD

SEQ ID NO: 941 - protein, 1150 aa, Enterococcus faecalis
MYSIGLDLGISSVGWSVIDERTGNVIDLGVRLFSAKNSEKNLERRTNRGGRRLIRRKTNRLKDAKKILAAVGFYEDKSLKNSCPYQLRVKGLTEPLSKGEIYKVTLHILKKRGISYLDEDDTEAAKESQDYKEQVRENAQLLTKYTPGQIQLQRLKENNRVKTGINAQGNYQLNVFKVSAYANELATILKTQQAFYPNELTDDWIALFVQPGIAEEAGLIYRKRPYYHGPGNEANNSPYGRWSDFKKTGQPATNIFDKLIGKDFQGELRASGLSLSAQQYNLLNDLTNLKIDGEIPLSPEQKEYILAELMTKEFTRFGVNDVVKLLGVKKERLSGWRLDKKGKPEIHTLKGYRNWRKIFAESGIDLAMLPTETIDCLAKILTLNTEREGIENTLAFELPELAESVKLLVLDRYKELSQSVSTQAWHRFSLKTLHLLIPELMNATSEQNTLLEQFQLKSDVRKRYSEYKKLPTKDVLTEIYNPTVNKTVSQAFKVIDALLVKYGKEQIRYITIEMPRDDNEEDEKKRIKELHAKNSQRKNDSQSYFMQKSGWSQEKFQTTIQKNRRFLAKLLYYYEQDGICAYTGLSISPELLVSDSTEIDHIIPISISLDDSINNKVLVLSKANQVKGQQTPYDAWMDGSFKKINGKFSNWDDYQKWVESRHFSHKKENNLLETRNIFDSEQVEKFLARNLNDTRYASRLVLNTLQSFFANQETKVRVVNGSFTHTLRKKWGADLDKTRETHHHHAVDATLCAVTPFVKVSRYHYAVKEETGEKVMREIDFETGEIVDEMSYREFKKSKKYERKTYQVKWPNFREQLKPVNLHPRIKFSHQVDRKANRKLSDATIYSVREKTEVKTLKSGKQKITTDEYTIGKIKDIYTVDGWEAFKKKQDKLLMKDLDEKTYERLLSIAETTPDFQEVEEKNGKVKRVKRSPFAVYCEENDIPAIRKYAKKNNGPLIRSLKYYDGKLNKHINITKDSQGRPVEKTKNGRKVTLQSLKPYRYDIYQDLETKAYYTVQLYYSDLRFVEGKYGITEKEYMKKVAEQTKGQVVRFCFSLQKNDGLEIEWKDSQRYDVRFYNFQSANSINFKGLEQEMMPAENQFKQKPYNNGAINLNIAKYGKEGKKLRKFNTDILGKKHYLYYEKEPKNIIK

SEQ ID NO: 942 - protein, 1150 aa, Enterococcus faecalis
MYSIGLDLGISSVGWSVIDERTGNVIDLGVRLFSAKNSEKNLERRTNRGGRRLIRRKTNRLKDAKKILAAVGFYEDKSLKNSCPYQLRVKGLTEPLSKGEIYKVTLHILKKRGISYLDEDDTEAAKESQDYKEQVRKNAQLLTKYTPGQIQLQRLKENNRVKTGINAQGNYQLNVFKVSAYANELATILKTQQAFYPNELTDDWIALFVQPGIAEEAGLIYRKRPYYHGPGNEANNSPYGRWSDFKKTGQPATNIFDRLIGKDFQGELRASGLSLSAQQYNLLNDLTNLKIDGEIPLSPEQKEYILAELMTKEFTRFGVNDVAKLLGVKKERLSGWRLDKKGKPEIHTLKGYRNWRKIFAESGIDLATLPTETIDCLAKVLTLNTEHEGIENTLAFELPELAESVKLLVLDRYKELSQSVSTQAWHRFSLKTLHLLIPELMNATSEQNTLLEQFQLKSDVRKRYSEYKKLPTKDVLTEIYNPTVNKTVSQAFKVIDALLVKYGKEQIRYITIEMPRDDNEEDEKKRIKELHAKNSQRKNDSQSYFMQKSGWSQEKFQTTIQKNRRFLAKLLYYYEQDGICAYTGLSISPELLVSDSTEIDHIIPISISLDDSINNKVLVLSKANQVKGQQTPYDAWMDGSFKKINGKFSNWDDYQKWVESRHFSHKKENNLLETRNIFDSEQVEKFLARNLNDTRYASRLVLNTLQSFFANHETKVRVVNGSFTHTLRKKWGADLDKTRETHHHHAVDATLCAVTPFVKVSRYHYAVKEETGEKVMREIDFETGEIVDEMSYQEFKKSKKYERKTYQVKWPNFREQLKPVNLHPRIKFSHQVDRKANRKLSDATIYSVREKTEVKTLKSGKQKITTDEYTIGKIKDIYTVDGWEAFKKKQDKLLMKDLDEKTYERLLSIAETTPDFQEVEEKNGKVKRVKRSPFAVYCEENDIPAIQKYAKKNNGPLIRSLKYYDGKLNKHINITKDSQGRPVEKTKNGRKVTLQSLKPYRYDIYQDLETKAYYTVQLYYSDLRFVEGKYGITEKEYMKKVAEQTKGQVVRFCFSLQKNDGLEIEWKDSQRYDVRFYNFQSANSINFKGLEQEMMPAENQFKQKPYNNGAINLNIAKYGKEGKKLRKFNTDILGKKHYLYYEKEPKNIIK

SEQ ID NO: 943 - protein, 1150 aa, Enterococcus faecalis
MYSIGLDLGISSVGWSVIDERTGNVIDLGVRLFSAKNSEKNLERRTNRGGRRLIRRKTNRLKDAKKILAAVGFYEDKSLKNSCPYQLRVKGLTEPLSKGEIYKVTLHILKKRGISYLDEDDTEAAKESQDYKEQVRKNAQLLTKYTPGQIQLQRLKENNRVKTGINVQGNYQLNVFKVSAYANELATILKTQQAFYPNELTDDWIALFVQPGIAEEAGLIYRKRPYYHGPGNEANNSPYGRWSDFQKTGEPATNIFDKLIGKDFQGELRASGLSLSAQQYNLLNDLTNLKIDGEVPLSSEQKEYILTELMTKEFTRFGVNDVVKLLGVKKERLSGWRLDKKGKPEIHTLKGYRNWRKIFAEAGIDLATLPTETIDCLAKVLTLNTEREGIENTLAFELPELSESVKLLVLDRYKELSQSISTQSWHRFSLKTLHLLIPELMNATSEQNTLLEQFQLKSDVRKRYSEYKKLPTKDVLAEIYNPTVNKTVSQAFKVIDALLVKYGKEQIRYITIEMPRDDNEEDEKKRIKELHAKNSQRKNDSQSYFMQKSGWSQEKFQTTIQKNRRFLAKLLYYYEQDGICAYTGLPISPELLVSDSTEIDHIIPISISLDDSINNKVLVLSKANQVKGQQTPYDAWMDGSFKKINGKFSNWDDYQKWVESRHFSHKKENNLLETRNIFDSEQVEKFLARNLNDTRYASRLVLNTLQSFFTNQETKVRVVNGSFTHTLRKKWGADLDKTRETHHHHAVDATLCAVTPFVKVSRYHYAVKEETGEKVMREIDFETGEIVNEMSYREFKKSKKYERKTYQVKWPNFREQLKPVNLHPRIKFSHQVDRKANRKLSDATIYSVREKTEVKTLKSGKQKITTDEYTIGKIKDIYTLDGWEAFKKKQDKLLMKDLDEKTYERLLSIAETTPDFQEVEEKNGKVKRVKRSPFAVYCEENDIPAIQKYAKKNNGPLIRSLKYYDGKLNKHINITKDSQGRPVEKTKNGRKVTLQSLKPYRYDIYQDLETKAYYTVQLYYSDLRFVEGKYGITEKEYMKKVAEQTKGQVVRFCFSLQKNDGLEIEWKDSQRYDVRFYNFQSANSINFKGLEQEIMPAENQFKQKPYNNGAINLNIAKYGKEGKKLRKFNTDILGKKHYLFYEKEPKNIIK

SEQ ID NO: 944 - protein, 1150 aa, Enterococcus faecalis; identical to SEQ ID NO: 178

SEQ ID NO: 945 - protein, 1150 aa, Enterococcus faecalis; identical to SEQ ID NO: 179

SEQ ID NO: 946 - protein, 1340 aa, Enterococcus faecium
MKKEYTIGLDIGTNSVGWSVLTDDYRLVSKKMKVAGNTEKSSTKKNFWGVRLFDEGQTAEARRSKRTARRRLARRRQRILELQKIFAPEILKIDEHFFARLNESFLVLDEKKQSRHPVFATIKQEKSYHQTYPTIYHLRQALADSSEKADIRLVYLAMAHLLKYRGHFLIEGELNTENSSVTETFRQFLSTYNQQFSEADDKQTEKLDEAVDCSFVFTEKMSKTKKAETLLKYFPHEKSNGYLSQFIKLMVGNQGNFKNVFGLEEEAKLQFSKETYEEDLEELLEKIGDDYIDLFVQAKNVYDAVLLSEILSDSTKNTRAKLSAGMIRRYDAHKEDLVLLKRFVKENLPKKYRAFFGDNSVNGYAGYIEGHATQEDFYKFVKKELTGIRGSEVFLTKIEQENFLRKQRTFDNGVIPHQIHLTELRAIIANQKKHYPFLKEEQEKLESLLTFKIPYYVGPLAKKQENSPFAWLIRKSEEKIKPWNLPEIVDMEGSAVRFIERMNNTDMYIPHNKVLPKNSLLYQKFSIYNELTKVRYQDERGQMNYFSSIEKKEIFHELFEKNRKVTKKDLQEFLYLKYDIKHAELSGIEKAFNASYTTYHDFLTMSENKREMKQWLEDPELASMFEEIIKTLTVFEDREMIKTRLSHHEATLGKHIIKKLTKKHYTGWGRLSKELIQGIRDKQSNKTILDYLINDDDFPHHRNRNFMQLINDDSLSFKKEIKKAQMITDTENLEEIVKELTGSPAIKKGILQSLKIVDEIVGIMGYEPANIVVEMARENQTTGRGLKSSRPRLKALEESLKDFGSQLLKEYPTDNSSLQKDRLYLYYLQNGRDMYTGAPLDIHRLSDYDIDHIIPRSFTTDNSIDNKVLVSSKENRLKKDDVPSEKVVKKMRSFWYDLYSSKLISKRKLDNLTKIKLTEEDKAGFIKRQLVETRQITKHVAGILHHRFNKAEDTNEPIRKVRIITLKSALVSQFRNRFGIYKVREINEYHHAHDAYLNGVVALALLKKYPQLAPEFVYGEYLKFNAHKANKATVKKEFYSNIMKFFESDTPVCDENGEIFWDKSKSIAQVKKVINHHHMNIVKKTEIQKGGFSKETVEPKKDSSKLLPRKNNWDPAKYGGLGSPNVAYTVAFTYEKGKARKRTNALEGITIMEREAFEQSPVLFLKNKGYEQAEIEMKLPKYALFELENGRKRMVASNKEAQKANSFLLPEHLVTLLYHAKQYDEISHKESFDYVNEHHKEFSEVFARVLEFAGKYTLAEKNIEKLEKIYKENQTDDLAKLASSFVNLMQFNAMGAPADFKFFDVTIPRKRYTSLTEIWQSTIIHQSITGLYETRIRMGK

SEQ ID NO: 947 - protein, 1339 aa, Enterococcus faecium
MKKEYTIGLDIGTNSVGWSVLTDDYRLVSKKMKVAGNTEKSSTKKNFWGVRLFDEGQTAEARRSKRTARRRLARRRQRILELQKIFAPEILKIDEHFFARLNESFLVLDEKKQSRHPVFATIKQEKSYHQTYPTIYHLRQALADSSEKADIRLVYLAMAHLLKYRGHFLIEGELNTENSSVTETFRQFLSTYNQQFSEADDKQTEKLDEAVDCSFVFTEKMSKTKKAETLLKYFPHEKSNGYLSQFIKLMVGNQGNFKNVFGLEEAKLQFSKETYEEDLEELLEKIGDDYIDLFVQAKNVYDAVLLSEILSDSTKNTRAKLSAGMIRRYDAHKEDLVLLKRFVKENLPKKYRAFFGDNSVNGYAGYIEGHATQEDFYKFVKKELTGIRGSEVFLTKIEQENFLRKQRTFDNGVIPHQIHLTELRAIIANQKKHYPFLKEEQEKLESLLTFKIPYYVGPLAKKQENSPFAWLIRKSEEKIKPWNLPEIVDMEGSAVRFIERMINTDMYMPHNKVLPKNSLLYQKFSIYNELTKVRYQDERGQMNYFSSIEKKEIFHELFEKNRKVTKKDLQEFLYLKYDIKHAELSGIEKAFNASYTTYHDFLTMSENKREMKQWLEDPELASMFEEIIKTLTVFEDREMIKTRLSHHEATLGKHIIKKLTKKHYTGWGRLSKELIQGIRDKQSNKTILDYLINDDDFPHHRNRNFMQLINDDSLSFKKEIKKAQMITDTENLEEIVKELTGSPAIKKGILQSLKIVDEIVGIMGYEPANIVVEMARENQTTGRGLKSSRPRLKALEESLKDFGSQLLKEYPTDNSSLQKDRLYLYYLQNGRDMYTGAPLDIHRLSDYDIDHIIPRSFTTDNSIDNKVLVSSKENRLKKDDVPSEKVVKKMRSFWYDLYSSKLISKRKLDNLTKIKLTEEDKAGFIKRQLVETRQITKHVAGILHHRFNKAEDTNEPIRKVRIITLKSALVSQFRNRFGIYKVREINEYHHAHDAYLNGVVALALLKKYPQLAPEFVYGEYLKFNAHKANKATVKKEFYSNIMKFFESDTPVCDENGEIFWDKSKSIAQVKKVINHHHMNIVKKTEIQKGGFSKETVEPKKDSSKLLPRKNNWDPAKYGGLGSPNVAYTVAFTYEKGKARKRTNALEGITIMEREAFEQSPVLFLKNKGYEQAEIEMKLPKYALFELENGRKRMVASNKEAQKANSFLLPEHLVTLLYHAKQYDEISHKESFDYVNEHHKEFSEVFARVLEFAGKYTLAEKNIEKLEKIYKENQTDDLAKLASSFVNLMQFNAMGAPADFKFFDVTIPRKRYTSLTEIWQSTIIHQSITGLYETRIRMGK

SEQ ID NO: 948 - protein, 1340 aa, Enterococcus faecium
MKKEYTIGLDIGTNSVGWSVLTDDYRLVSKKMKVAGNTEKSSTKKNFWGVRLFDEGQTAEARRSKRTARRRLARRRQRILELQKIFAPEILKIDEHFFARLNESFLVLDEKKQSRHPVFATIKQEKSYHQTYPTIYHLRQALADSSEKADIRLVYLAMAHLLKYRGHFLIEGELNTENSSVTETFRQFLSTYNQQFSEADDKQTEKLDEAVDCSFVFTEKMSKTKKAETLLKYFPHEKSNGYLSQFIKLMVGNQGNFKNVFGLEEEAKLQFSKETYEEDLEELLEKIGDDYIDLFVQAKNVYDAVLLSEILSDSTKNTRAKLSAGMIRRYDAHKEDLVLLKRFVKENLPKKYRAFFGDNSVNGYAGYIEGHATQEDFYKFVKKELTGIRGSEVFLTKIEQENFLRKQRTFDNGVIPHQIHLTELRAIIANQKKHYPFLKEEQEKLESLLTFKIPYYVGPLAKKQENSPFAWLIRKSEEKIKPWNLPEIVDMEGSAVRFIERMINTDMYIPHNKVLPKNSLLYQKFSIYNELTKVRYQDERGQMNYFSSIEKKEIFHELFEKNRKVTKKDLQEFLYLKYDIKHAELSGIEKAFNASYTTYHDFLTMSENKREMKQWLEDPELASMFEEIIKTLTVFEDREMIKTRLSHHEATLGKHIIKKLTKKHYTGWGRLSKELIQGIRDKQSNKTILDYLINDDDFPHHRNRNFMQLINDDSLSFKKEIKKAQMITDTENLEEIVKELTGSPAIKKGILQSLKIVDEIVGIMGYEPANIVVEMARENQTTGRGLKSSRPRLKALEESLKDFGSQLLKEYPTDNSSLQKDRLYLYYLQNGRDMYTGAPLDIHRLSDYDIDHIIPRSFTTDNSIDNKVLVSSKENRLKKDDVPSEKVVKKMRSFWYDLYSSKLISKRKLDNLTKIKLTEEDKAGFIKRQLVETRQITKHVAGILHHRFNKAEDTNEPIRKVRIITLKSALVSQFRNRFGIYKVREINEYHHAHDAYLNGVVALALLKKYPQLAPEFVYGEYLKFNAHKANKATVKKEFYSNIMKFFESDTPVCDENGEIFWDKSKSIAQVKKVINHHHMNIVKKTEIQKGGFSKETVEPKKDSSKLLPRKNNWDPAKYGGLGSPNVAYTVAFTYEKGKARKRTNALEGITIMEREAFEQSPVLFLKNKGYEQAEIEMKLPKYALFELENGRKRMVASNKEAQKANSFLLPEHLVTLLYHAKQYDEISHKESFDYVNEHHKEFSEVFARVLEFAGKYTLAEKNIEKLEKIYKENQTDDLAKLASSFVNLMQFNAMGAPADFKFFDVTIPRKRYTSLTEIWQSTIIHQSITGLYETRIRMGK

SEQ ID NO: 949 - protein, 1340 aa, Enterococcus faecium
MKKEYTIGLDIGTNSVGWSVLTDDYRLVSKKMKVAGNTEKSSTKKNFWGVRLFDEGQTAEARRSKRTARRRLARRRQRILELQKIFAPEILKIDEHFFARLNESFLVLDEKKQSRHPVFATIKQEKSYHQTYPTIYHLRQALADSSEKADIRLVYLAMAHLLKYRGHFLIEGELNTENSSVTETFRQFLSTYNQQFSEADDKQTEKLDEAVDCSFVFTEKMSKTKKAETLLKYFPHEKSNGYLSQFIKLMVGNQGNFKNVFGLEEEAKLQFSKETYEEDLEELLEKIGDDYIDLFVQAKNVYDAVLLSEILSDSTKNTRAKLSAGMIRRYDAHKEDLVLLKRFVKENLPKKYRAFFGDNSVNGYAGYIEGHATQEDFYKFVKKELTGIRGSEVFLTKIEQENFLRKQRTFDNGVIPHQIHLTELRAIIANQKKHYPFLKEEQEKLESLLTFKIPYYVGPLAKKQENSPFAWLIRKSEEKIKPWNLPEIVDMEGSAVRFIERMINTDMYMPHNKVLPKNSLLYQKFSIYNELTKVRYQDERGQMNYFSSIEKKEIFHELFEKNRKVTKKDLQEFLYLKYDIKHAELSGIEKAFNASYTTYHDFLTMSENKREMKQWLEDPELASMFEEIIKTLTVFEDREMIKTRLSHHEATLGKHIIKKLTKKHYTGWGRLSKELIQGIRDKQSNKTILDYLINDDDFPHHRNRNFMQLINDDSLSFKKEIKKAQMITDTENLEEIVKELTGSPAIKKGILQSLKIVDEIVGIMGYEPANIVVEMARENQTTGRGLKSSRPRLKALEESLKDFGSQLLKEYPTDNSSLQKDRLYLYYLQNGRDMYTGAPLDIHRLSDYDIDHIIPRSFTTDNSIDNKVLVSSKENRLKKDDVPSEKVVKKMRSFWYDLYSSKLISKRKLDNLTKIKLTEEDKAGFIKRQLVETRQITKHVAGILHHRFNKAEDTNEPIRKVRIITLKSALVSQFRNRFGIYKVREINEYHHAHDAYLNGVVALALLKKYPQLAPEFVYGEYLKFNAHKANKATVKKEFYSNIMKFFESDTPVCDENGEIFWDKSKSIAQVKKVINHHHMNIVKKTEIQKGGFSKETVEPKKDSSKLLPRKNNWDPAKYGGLGSPNVAYTVAFTYEKGKARKRTNALEGITIMEREAFEQSPVLFLKNKGYEQAEIEMKLPKYALFELENGRKRMVASNKEAQKANSFLLPEHLVTLLYHAKQYDEISHKESFDYVNEHHKEFSEVFARVLEFAGKYTLAEKNIEKLEKIYKENQTDDLAKLASSFVNLMQFNAMGAPADFKFFDVTIPRKRYTSLTEIWQSTIIHQSITGLYETRIRMGK

SEQ ID NO: 950 - protein, 1339 aa, Enterococcus faecium
MKKEYTIGLDIGTNSVGWSVLTDDYRLVSKKMKVAGNTEKSSTKKNFWGVRLFDEGQTAEARRSKRTARRRLARRRQRILELQKIFAPEILKIDEHFFARLNESFLVLDEKKQSRHPVFATIKQEKSYHQTYPTIYHLRQALADSSEKADIRLVYLAMAHLLKYRGHFLIEGELNTENSSVTETFRQFLSTYNQQFSEADDKQTEKLDEAVDCSFVFTEKMSKTKKAETLLKYFPHEKSNGYLSQFIKLMVGNQGNFKNVFGLEEAKLQFSKETYEEDLEELLEKIGDDYIDLFVQAKNVYDAVLLSEILSDSTKNTRAKLSAGMIRRYDAHKEDLVLLKRFVKENLPKKYRAFFGDNSVNGYAGYIEGHATQEDFYKFVKKELTGIRGSEVFLTKIEQENFLRKQRTFDNGVIPHQIHLTELRAIIANQKKHYPFLKEEQEKLESLLTFKIPYYVGPLAKKQENSPFAWLIRKSEEKIKPWNLPEIVDMEGSAVRFIERMINTDMYIPHNKVLPKNSLLYQKFSIYNELTKVRYQDERGQMNYFSSIEKKEIFHELFEKNRKVTKKDLQEFLYLKYDIKHAELSGIEKAFNASYTTYHDFLTMSENKREMKQWLEDPELASMFEEIIKTLTVFEDREMIKTRLSHHEATLGKHIIKKLTKKHYTGWGRLSKELIQGIRDKQSNKTILDYLINDDDFPHHRNRNFMQLINDDSLSFKKEIKKAQMITDTENLEEIVKELTGSPAIKKGILQSLKIVDEIVGIMGYEPANIVVEMARENQTTGRGLKSSRPRLKALEESLKDFGSQLLKEYPTDNSSLQKDRLYLYYLQNGRDMYTGAPLDIHRLSDYDIDHIIPRSFTTDNSIDNKVLVSSKENRLKKDDVPSEKVVKKMRSFWYDLYSSKLISKRKLDNLTKIKLTEEDKAGFIKRQLVETRQITKHVAGILHHRFNKAEDTNEPIRKVRIITLKSALVSQFRNRFGIYKVREINEYHHAHDAYLNGVVALALLKKYPQLAPEFVYGEYLKFNAHKANKATVKKEFYSNIMKFFESDTPVCDENGEIFWDKSKSIAQVKKVINHHHMNIVKKTEIQKGGFSEETVEPKKDSSKLLPRKNNWDPAKYGGLGSPNVAYTVAFTYEKGKARKRTNALEGITIMEREAFEQSPVLFLKNKGYEQAEIEMKLPKYALFELENGRKRMVASNKEAQKANSFLLPEHLVTLLYHAKQYDEISHKESFDYVNEHHKEFSEVFARVLEFAGKYTLAEKNIEKLEKIYKENQTDDLAKLASSFVNLMQFNAMGAPADFKFFDVTIPRKRYTSLTEIWQSTIIHQSITGLYETRIRMGK

SEQ ID NO: 951 - protein, 1340 aa, Enterococcus faecium
MKKEYTIGLDIGTNSVGWSVLTDDYRLVSKKMKVAGNTEKSSTKKNFWGVRLFDEGQTAEARRSKRTARRRLARRRQRILELQKIFAPEILKIDEHFFARLNESFLVLDEKKQSRHPVFATIKQEKSYHQTYPTIYHLRQALADSSEKADIRLVYLAMAHLLKYRGHFLIEGELNTENSSVTETFRQFLSTYNQQFSEADDKQTEKLDEAVDCSFVFTEKMSKTKKAETLLKYFPHEKSNGYLSQFIKLMVGNQGNFKNVFGLEEEAKLQFSKETYEEDLEELLEKIGDDYIDLFVQAKNVYDAVLLSEILSDSTKNTRAKLSAGMIRRYDAHKEDLVLLKRFVKENLPKKYRAFFGDNSVNGYAGYIEGHATQEDFYKFVKKELTGIRGSEVFLTKIEQENFLRKQRTFDNGVIPHQIHLTELRAIIANQKKHYPFLKEEQEKLESLLTFKIPYYVGPLAKKQENSPFAWLIRKSEEKIKPWNLPEIVDMEGSAVRFIERMINTDMYIPHNKVLPKNSLLYQKFSIYNELTKVRYQDERGQMNYFSSIEKKEIFHELFEKNRKVTKKDLQEFLYLKYDIKHAELSGIEKAFNASYTTYHDFLTMSENKREMKQWLEDPELASMFEEIIKTLTVFEDREMIKTRLSHHEATLGKHIIKKLTKKHYTGWGRLSKELIQGIRDKQSNKTILDYLINDDDFPHHRNRNCMQLINDDSLSFKKEIKKAQMITDTENLEEIVKELTGSPAIKKGILQSLKIVDEIVGIMGYEPANIVVEMARENQTTGRGLKSSRPRLKALEESLKDFGSQLLKEYPTDNSSLQKDRLYLYYLQNGRDMYTGAPLDIHRLSDYDIDHIIPRSFTTDNSIDNKVLVSSKENRLKKDDVPSEKVVKKMRSFWYDLYSSKLISKRKLDNLTKIKLTEEDKAGFIKRQLVETRQITKHVAGILHHRFNKAEDTNEPIRKVRIITLKSALVSQFRNRFGIYKVREINEYHHAHDAYLNGVVALALLKKYPQLAPEFVYGEYLKFNAHKANKATVKKEFYSNIMKFFESDTPVCDENGEIFWDKSKSIAQVKKVINHHHMNIVKKTEIQKGGFSKETVEPKKDSSKLLPRKNNWDPTKYGGLGSPNVAYTVAFTYEKGKARKRTNALEGITIMEREAFEQSPVLFLKNKGYEQAEIEMKLPKYALFELENGRKRMVASNKEAQKANSFLLPEHLVTLLYHAKQYDEISHKESFDYVNEHHKEFSEVFARVLEFAGKYTLAEKNIEKLEKIYKENQTDDLAKLASSFVNLMQFNAMGAPADFKFFDVTIPRKRYTSLTEIWQSTIIHQSITGLYETRIRMGK

SEQ ID NO: 952 - protein, 892 aa, Enterococcus faecium
MTFKIPYYVGPLAKKQENSPFAWLIRKSEEKIKPWNLPEIVDMEGSAVRFIERMINTDMYMPHNKVLPKNSLLYQKFSIYNELTKVRYQDERGQMNYFSSIEKKEIFHELFEKNRKVTKKDLQEFLYLKYDIKHAELSGIEKAFNASYTTYHDFLTMSENKREMEQWLEDPELASMFEEIIKTLTVFEDREMIKTRLSHHKATLGKHIIKKLTKKHYTGWGRLSKELIQGIRDKQSNKTILDYLINDDDFPHHRNRNFMQLINDDSLSFKKEIKKAQMITDTENLEEIVKELTGSPAIKKGILQSLKIVDEIVGIMGYEPANIVVEMARENQTTGRGLKSSRPRLKALEESLKDFGSQLLKEYPTDNSSLQKDRLYLYYLQNGRDMYTGAPLDIHRLSDYDIDHIIPRSFTTDNSIDNKVLVSSKENRLKKDDVPSEKVVKKMRSFWYDLYSSKLISKRKLDNLTKIKLTEEDKAGFIKRQLVETRQITKHVAGILHHRFNKAEDTNEPIRKVRIITLKSALVSQFRNRFGIYKVREINEYHHAHDAYLNGVIALALLKKYPQLAPEFVYGEYLKFNAHKANKATVKKEFYSNIMKFFESDTPVCDENGEIFWDKSKSIAQVKKVINHHHMNIVKKTEIQKGGFSKETVEPKKDSSKLLPRKNNWDPAKYGGLGSPNVAYTVAFTYEKGKARKRTNALEGITIMEREAFEQSPVLFLKNKGYEQAEIEMKLPKYALFELENGRKRMVASNKEAQKANSFLLPEHLVTLLYHAKQYDEISHKESFDYVNEHHKEFSEVFARVLEFAGKYTLAEKNIEKLEKIYKENQTDDLAKLASSFVNLMQFNAMGAPADFKFFDVTIPRKRYTSLTEIWQSTIIHQSITGLYETRIRMGK

SEQ ID NO: 953 - protein, 1336 aa, Enterococcus hirae
MTKDYTIGLDIGTNSVGWAVLTDDYQLMKRKMSVHGNTEKKKIKKNFWGARLFDEGQTAEFRRTKRTNRRRLARRKYRLSKLQDLFAEELCKQDDCFFVRLEESFLVPEEKQYKPASIFPTLEEEKEYYQKYPTIYHLRQKLVDSTEKEDLRLVYLALAHLLKYRGHFLFEGDLDTENTSIEESFRVFLEQYSKQSDQPLIVHQPVLTILTDKLSKTKKVEEILKYYPTEKINSFFAQCLKLIVGNQANFKRIFDLEAEVKLQFSKETYEEDLESLLEKIGDEYLDIFLQAKKVHDAILLSEIISSTVKHTKAKLSSGMVERYERHKADLAKFKQFVKENVPQKATVFFKDTTKNGYAGYIKGKTTQEEFYKFVKKELSGVVGSEPFLEKIDQETFLLKQRTYTNGVIPHQVHLIELKAIIDQQKQHYPFLEEAGPKIIALFKFRIPYYVGPLAKEQEASSFAWIERKTAEKINPWNFSEVVDIEKSAMRFIQRMTKQDTYLPTEKVLPKNSLLYQKYMIFNELTKVSYKDERGVKQYFSGDEKQQIFKQLFQKERGKITVKKLQNFLYTHYHIENAQIFGIEKAFNASYSTYHDFMKLAKTNQKAMQEWLEQPEMEPIFEDIVKILTIFEDRQMIKHQLSKYQEVFGEKLLKEFARKHYTGWGRFSAKLIHGIRDRKTNKTILDYLINDDDVPANRNRNLMQLINDEHLSFKEEIAKATVFSKHKSLVDVIQDLPGSPAIKKGIWQSLKIVEELIAIIGYKPKNIVIEMARENQKTHRTSPRLKALENGLKQIGSTLLKEQPTDNKALQKERLYLYYLQNGRDMYTGEPLEIENLHQYEVDHIIPRSFIVDNSIDNKVLVASKQNQKKRDDVPKKQIVNEQRIFWNQLKEAKLISPKKYAYLTKIELTPEDKARFIQRQLVETRQITKHVANILHQSFNQEEEGTDCDGVQIITLKATLTSQFRQTFGLYKVREINPHHHAHDAYLNGFIANVLLKRYPKLAPEFVYGKYVKYSLARENKATAKKEFYSNILKFLESDEPFCDENGEIYWEKSHHLPRIKKVLSSHQVNVVKKVEQQKGGFYKETVNSKEKPDKLIERKNNWDVTKYGGFGSPVIAYAIAFVYAKGKTQKKTRAIEGITIMEQAAFEKDPTTFLKEKGFPQVTEFIKLPKYTLFEFDNGRRRFLASHKESQKGNPFILSDQLVTLLYHAQHYDKITYQESFDYVNTHLSDFSAILTEVLAFAEKYTLADKNIERIQELYEENKYGETSMIAQSFLQLLQFNAIGAPADFKFFGVTIPRKRYTSLTEIWDATIIYQSVTGLYETRIRMGDLWAGEQ

SEQ ID NO: 954 - protein, 116 aa, Unknown
  Enterococcus sp. 7L76
MYSIGLDLGISSVGWSVIDERTGNVIDLGVRLFSAKNSEKNLERRTNRGGRRLIRRKTNRLKDAKKILAAVGFYEDKSLKNSCPYQLRVKGLTELLSKGEIYKVTLHILKNVELVT

SEQ ID NO: 955 - protein, 1391 aa, Unknown
  Eubacterium sp. AS15
MENKQYYIGLDVGTNSVGWAVTDTSYNLLRAKGKDMWGARLFDEAKTAVERRTKRTSRRRSEREKARKAMLKELFADEINKVDPNFFIRLEESKFFLDDRSENNRQRYTLFNDAKFTDKDYYEKYKTIFHLRSALINSDEKFDVRLVFLAILNLFSHRGHFLNASLKGDGEIQGVDIFYNDLYEVCEEFEIDLPQISNIDNFEKILSQKGKSRTKILEELSEELSISKKEKIKYSLLKLICGMKIKVVDIYADEDIQEDDKKKDLGFRESDYEKSSLEVKEIIGDDHFELIERAKAVHDIGLLANIIGNSKYLCEARVEAYDNHHKDLQKIKELLKKYDIKAYTDMFRKMTDKNYSAYVGSVNSNIAKERRSVDNRKIEDLYEYIKKIALKNISDDNEDKIEILKKIETGEFLKKQLTASNGVIPNQLQSRELRAILKKAENYLPFLKEKGEKNLTVSEMIIQLFEFQIPYYVGPLDKNPKKDKNANSWAVIPSGGRILPWNFEDKVDVKGSRKEFIEKMVRKCTYLSEEHTLPKQSLLYEKFMVLNEINNIKIDGEKISVEAKQKIYNDLFMKGKKVSQKAIKQELISLNIMSKDSVLSGIDTVCNAYLSSIAKFRGVFDENVNNQSTIDMIEDIIFLKTVYSDEKRFVKEEIVEKYGDEIDKDKIKRILGFKFSNWGNISKSFLELEGADVGTGEIRSIIQSLWETNFNLMELLSSRFTYMDELEKRVKKLEKPLSEWTIEDLDDMYLSSPVKRMIWQSMKIVDEIQTVIGYAPKRIFVEMTRSEGEKVRTKSRKDRLKELYSAIKEDSKQWVKELDAKDESYFRSKKMYLYYLQKGRCMYSGEVIELDKLMDDNLYDIDHIYPRSFVKDDSLDNLVLVKKEINNRKQNDPITPQIQASCQGFWKVLHEQGFISNEKYSRLTRKTQEFSDEEKLSFINRQIVETGQATKCMAQILQKSMGEDVDVVFSKARLVSEFRHKFELFKSRLINDFHHANDAYLNIVVGNSYFVKFTRNPANFIKDARKNPDNPAYKYHMDRFFERDVKSKSEVAWIGQSEGNAGTIAIVKKTMSKNSPLITKKVEEGHGSITKETIVGVKEIKFGRNKVEKADKTPKKANLQAYRPIKTSDERLCNILRYGGRTSISISGYCLVEYVKKRKTIRSLEAIPVYLGRKDSLSEEKLLNYFRYNLNDGGKDSVSDIRLCLPFISTNSLVKIDGYLYYLGGKNDDRIQLYNAYQLKMKKEEVEYIRKIEKAVSMSKFDEIDREKNPVLTEEKNIELYNKIQDKFENTVFSKRMSLVKYNKKDLSFGDFLKNKKSKFEEIDLEKQCKVLYNIIFNLSNLKEVDLSDIGGSKSTGKCRCKKNITNYKEFKLIQQSITGLYSCEKDLMTI

SEQ ID NO: 956 - protein, 1391 aa, Eubacterium yurii
MENKQYYIGLDVGTNSVGWAVTDTSYNLLRAKGKDMWGARLFEKANTAAERRTKRTSRRRSEREKARKAMLKELFADEINRVDPSFFIRLEESKFFLDDRSENNRQRYTLFNDATFTDKDYYEKYKTIFHLRSALINSDEKFDVRLVFLAILNLFSHRGHFLNASLKGDGDIQGMDVFYNDLVESCEYFEIELPRITNIDNFEKILSQKGKSRTKILEELSEELSISKKDKSKYNLIKLISGLEASVVELYNIEDIQDENKKIKIGFRESDYEESSLKVKEIIGDEYFDLVERAKSVHDMGLLSNIIGNSKYLCEARVEAYENHHKDLLKIKELLKKYDKKAYNDMFRKMTDKNYSAYVGSVNSNIAKERRSVDKRKIEDLYKYIEDTALKNIPDDNKDKIEILEKIKLGEFLKKQLTASNGVIPNQLQSRELRAILKKAENYLPFLKEKGEKNLTVSEMIIQLFEFQIPYYVGPLDKNPKKDNKANSWAKIKQGGRILPWNFEDKVDVKGSRKEFIEKMVRKCTYISDEHTLPKQSLLYEKFMVLNEINNIKIDGEKISVEAKQKIYNDLFVKGKKVSQKDIKKELISLNIMDKDSVLSGTDTVCNAYLSSIGKFTGVFKEEINKQSIVDMIEDIIFLKTVYGDEKRFVKEEIVEKYGDEIDKDKIKRILGFKFSNWGNLSKSFLELEGADVGTGEVRSIIQSLWETNFNLMELLSSRFTYMDELEKRVKKLEKPLSEWTIEDLDDMYLSSPVKRMIWQSMKIVDEIQTVIGYAPKRIFVEMTRSEGEKVRTKSRKDRLKELYNGIKEDSKQWVKELDSKDESYFRSKKMYLYYLQKGRCMYSGEVIELDKLMDDNLYDIDHIYPRSFVKDDSLDNLVLVKKEINNRKQNDPITPQIQASCQGFWKILHDQGFMSNEKYSRLTRKTQEFSDEEKLSFINRQIVETGQATKCMAQILQKSMGEDVDVVFSKARLVSEFRHKFELFKSRLINDFHHANDAYLNIVVGNSYFVKFTRNPANFIKDARKNPDNPVYKYHMDRFFERDVKSKSEVAWIGQSEGNSGTIVIVKKTMAKNSPLITKKVEEGHGSITKETIVGVKEIKFGRNKVEKADKTPKKPNLQAYRPIKTSDERLCNILRYGGRTSISISGYCLVEYVKKRKTIRSLEAIPVYLGRKDSLSEEKLLNYFRYNLNDGGKDSVSDIRLCLPFISTNSLVKIDGYLYYLGGKNDDRIQLYNAYQLKMKKEEVEYIRKIEKAVSMSKFDEIDREKNPVLTEEKNIELYNKIQDKFENTVFSKRMSLVKYNKKDLSFGDFLKNKKSKFEEIDLEKQCKVLYNIIFNLSNLKEVDLSDIGGSKSTGKCRCKKNITNYKEFKLIQQSITGLYSCEKDLMTI

SEQ ID NO: 957 - protein, 1142 aa, Facklamia hominis
MYSVGLDIGIASCGYSIINDVNGNIVELGTLLFKSRNSDNNEERRTNRGSRRLINRRRTRLDDGKKLLAEKGFKQDSKLKHVCPYELRVKGLHEKLTQGEIYKVVLHILKKRGISYLDESDENSSGIDGASYKDQVNLNLNLQKELTPGQIQLKRLKENGRIKSGVTFENGYQLNVFSVSAYANELNKILTKQSEYYSEIDQIWIDRFTKNGYRKEAGLVYRKRPYYDGPGNEKNNSIYGRWANFKEDGHPKENIFDQLIGLDSVDSTQVRASASTLTAQKYNLLNDLNNLTIIEDDRKFTTDEKVSIINYLMTQDITRFGPKELAKFYQLEVDQIRGWRIDNKGNPEIHSLKVYRDWKKIFNTSSIDLTSIQTWVVDELANVITLNTEIPSTLATLKIKIPDIDQQILNFVENNFYELKKKTSKNSWHSFSLKTLNILIPELLNTSEEQNTILERLNLKFDLKNKYAEKNQIPVKELLEQIYNPTVTKSVHQSIKLFNEIIEKYGKNNISYVTIEMPRDKNDQDQKDTIKRINKLNSERKNDSEKYFLERSGWDTIRFESALKKPRFAEKLLFYYEQKGKCAYSGQDILAESLLNESCEVDHIIPLSISFDDSIHNKVLVTASSNQEKGQRTPYMAFIDGAKLGQSWDDFVAWVNSCGFHRKKVQNLLYEENIFNPDVQRGFVSRNLNDTRYASRIVLNAIQSFFYKQKDLTKVKVVNGSFTHTLRKKWGSSLDKNRDTYHHHAVDATLCAVTPFINIVKYEFFEEDGIKYMVDLTTGEKVAYSDYKKMKFYDKRAYVPIWDGFIKQLTPANLYPKIKFSHQVDSKWNRKISDATIYSTRKIVETKINKKGVAKETVKDIVIDKIKDIYTPEGWRKFKEKQDKLLMKNFDEKTYNKLIKIAKEYPEKKEVQTSNGKVSLVEVSPFKMYCEEQNVPAIRKYSKKGNGPYIRSLKFYDKELGKHINITKDSYGNDIERTIRNKKIILKNQNSWRTDVYYNSVNNCYELLGIKYCHLKFYRGKYGIPKSIYDELKKEDEISSESVFKFSLYRHDRVRFEKDGEYIEALFGSKNESNKNYLELSPIDKNKWLSKENVKFFGEVAASGRFIKGLKPGIKVIKQSTDYMGHVYAIHQEKLKFVLSDA

SEQ ID NO: 958 - protein, 1347 aa, Finegoldia magna
MKSEKKYYIGLDVGTNSVGWAVTDEFYNILRAKGKDLWGVRLFEKAKTAADTRTFRSGRRRNDRKGMRLQILREIFEDEIKKVDKDFYDRLDESKFWAEDKKVSGKYSLFNDKNFSDKQYFEKFPTIFHLRKYLMEEHGKVDIRYYFLAINQMMKRRGHFLIDGQISHVTDDKPLKEQLILLINDLLKIELEEELMDSIFEILADVNEKRTDKKNNLKELIKGQDFNKQEGNILNSIFESIVTGKAKIKNIISDEDILEKIKEDNKEDFVLTGDSYEENLQYFEEVLQENITLFNTLKSTYDFVILQSILKGKSTLSDAQVERYDEHKKDLEILKKVIKKYDEDGKLFKQVFKEDNGNGYVSYIGYYLNKNKKITAKKKISNIEFTKYVKGILEKQCDCEDEAVKYLLGKIEQENFLLKQISSINSVIPHQIHLFELDKILENLAKNYPSFNNKKEEFTKIEKIRKTFTFRIPYYVGPLNDYHKNNGGNAWIFRNKGEKIRPWNFEKIVDLHKSEEEFIKRMLNQCTYLPEETVLPKSSILYSEYMVLNELNNLRIKGKPLDTDVKLKLIEELFKKKTKVTLKSIRDYMIRNNFADKEDFDNSEKNLEIVSNMKSYIDFNNILGDKFELEMVEDLIEKITIHTGNKTLLKKYIEETYPDLSSSQIQKIINLKYKDWGRLSRKLLDGIKGRNKTDDVNTVINFMRNSSDNLMQIIEGKNYSFNEYIDNLRKKYIPQEISYEVVENLYVSPSVKKMIWQVIRVTEEITKVMGYDPDKIFIEMAKSEEEKKTTISRKNKLLDLYKAIKKDERDSQYEKLLTGLNKLDESELRSKKLYLYYTQMGRDMYTGEKIDLDKLFDSTHYDKDHIIPQSMKKDDSIINNLVLVNKNANQTTKGNIYPVPSSIRNNPDIYNYWKYLMEKEFISKEKYNRLIRNTPLTNEELGVFINRQLVETRQSTKAIKELFEKFYQKSKIIPVKASLASDLRKDMNTLKSREVNDLHHAHDAFLNIVAGDVWNREFTSNPINYVNENREGDKVKYSLSKYFTRPRKSKGKVIWTPEKGRKLIVDTLNKPSVLISNESHVKKGELFNATISGKKDYKKGKIYLPLKKDDRLKDVSKYGGYKAINGAFFFLVEHTKSKKRIRSIELFPLHLLSKFYEDKNTVLDYAINVLQLQDPKIIIDKINYRTEIIIDNFSYLISTKSNDGSITVKPNEQMYWRVDEISNLKKIENKYKKDAILTEEDRKIMESYIDKIYQQFKAGKYKNRRTTDTIIEKYEIIDLDTLDNKQLYQLLVAFISLSYKTSNNAVDFTVIGLGTECGKPRITNLPDNTYLVYKSITGIYEKRIRIK

SEQ ID NO: 959 - protein, 1348 aa, Finegoldia magna; identical to SEQ ID NO: 222

SEQ ID NO: 960 - protein, 1516 aa, Flavobacteriaceae bacterium
MLKQQKDKIIGMNKKILGLDLGTNSIGWALVKQDLENKYGEIIGCGSRIIPMSQDVLGKFDAGISISQTAERTNYRSVRKLIQRNTLRRERLHRVLHQLDFLPKHYNDSIDFEKKLGQFKTDKETKLNYFVNQHGKHEFLFKDSFNEMVKEFKEEQPELFYIKNNGKETKIPYDWTIYYLRKKALSKKISKEELSWLVLNFNQKRGYYQLRGEIDEEKEKNKRYEKLYVSEVVKTNNTIKKTGEYLYDIYFDNGWKYEKQTTKPQDWLHKHKEFIITTTTLKNGETKRTFKTVDSEKDWIAIKSKTEQDIKESNKTVGAFIYDTLLKNPTQKIRGSLVKTIERKFYREEFEKILKEQIKHRPEINVNTAIGKENYTKCVTELYPRNEAHANNILTNDFNYLFTKDILFYQRPLKSKKSEIANCQYEYRTYIKKKEKTGKEERVKQPLKATPKSHPLFQEFRLWQFIHNLKIYIRETTVGNKPLFDVDITDTFFTSENDWATLFEYLNNKKEIEQKHVLEYLVSKKIISKSEKTDYRWNYVEDKKYPGNETRVDFINRLKKVENLNVDEFLTSELEFKLWHIIYSVTDKNEYEKALENFAIRQNIDKDSFVNSFKKFPPFKSDYGAYSTKAIKKLLPLMRLGKFWDGSEIPKVVVEKITDIKTRLTSVNYDESLFKKDEKKILETIVDDITPKQLLKSFVKLKGKNHLAGLNTYQACYLVYERHSESSDITQWENPDDIDSFLNHFKQHSLRNPIVEQVVTETLRTVRDIWKYYGNGSPNYFNEIHIELGREMKNPADKRKQMSAKINENENTNQRIKGILQELMNDGVQDIKPYSPSQQEILKIYEEGISQNPNVDYSKVSEDEITKIKKSNNPTLKEIQRYKLWLEQKYISPYTGKPIPLSELFTPAYQIEHIIPQSRYFDNSLSNKIICESEVNEDKSNKTAYEYLKTNGGSIVHGHHLLSLKEYEDHCQHYFKKNRTKLKNLLSEEIPEGFINRQLNDSRYISKLIKGLLSNIVREENEQEATSKNIVPVTGSITSKLKQDWGLNDKWNEIIAPRFKRLNKMTNSNDFGYFDEKINTFRIQVPDAISRGFNKKRIDHRHHTLDALVIACCTKKHIQYLNSLNNEIIKHELKPSILIKNAQGDYTKHFMLPWNNFPIDCKNAIENTIVSFKQNLRVINKTSNKYQSYKDENGNLRLGKDGKPKKGLTKQTKGNNWAVRKAMHEDTFYGEIVDGENKGKLKIKTLLDTSFDVKKIEDKVLDKSIRTILINYLKQDKYKNLSKPHEEAFSPNGIIEMNKNIISLNNNIPHKPIKRVTLKHEKGKKFSIKTLLDKKTKFAKSATGTNVFFCIYKNINGKIKYHTPSFEEIIEIQKQEFEIKYKSKLNVPETLFDKKESFELLFYLQPNDLVYLPNDEELKNRQLIDFNNLNKKQIKRIYKFTDGSGTTANFIPYQVAKVIFNLNKKEQAKSSFKYPIQNEFGVGSPQSKNQKSIEGILIKERCIKLKIDRLGNISKA

SEQ ID NO: 961 - protein, 1629 aa, Unknown
  Francisella cf. novicida Fx1
MNFKILPIAIDLGVKNTGVFSAFYQKGTSLERLDNKNGKVYELSKDSYTLLMNNRTARRHQRRGIDRKQLVKRLFKLIWTEQLNLEWDKDTQQAISFLFNRRGFSFITDGYSPEYLNIVPEQVKAILMDIFDDYNGEDDLDSYLKLATEQESKISEIYNKLMQKILEFKLRKLCTDIKDDKVSTKTLKEITSYEFELLADYLANYSEILKTQKFSYTDKQGNLKELSYYHHDKYNIQEFLKRHATINIQILDTLLTDDLDIWNFNFEKFDFDKNEEKLQNQEDKDHIQAHLHHFVFAVNKIKSEMASGGRHRSQYFQEITNVLDENNHQEGYLKNFCENLHNKKYSNLSVKNLVNLIGNLSNLELKPLRKYFNDKIHAKADHWDEQKFTETYCHWILGEWRVGVKDQDKKDGAKYSYKDLCNELKQKVTKAGLVDFLLELDPCRTIPPYLDNNNRKPPKCQSLILNPKFLDNQYPNWQQYLQELKKLQSIQNYLESFETDLKVLKSSKDQPYFVEYRSSNQQIASGQRDYKDLDARILQFIFDRVKASDELLLNEIYFQAKKLKQKASSELEKLESSKKLDEVIANSQLSQILKSQHTNGIFEQGTFLHLVCKYYKQRQRARDSRLYIMPEYRYDKKLHKYNNTGRFDDDNQLLTYCNHKPRQKRYQLLNDLAGVLQVSPNFLKDKIGSDDDLFISKWLVEHIRGFKKACEDSLKIQKDNRGLLNHKINIARNTKGKCEKEIFNLICKIEGSEDKKGNYKHGLAYELGVLLFGEPNEASKPEFDRKIKKFNSIYSFAQIQQIAFAERKGNANTCAVCSADNAHRMQQIKITEPVEDNKDKIILSAKAQRLPAITTRIVDGAVKKMATILAKNIVDDNWQNIKQVLSAKHQLHIPIITESNAFEFEPALADVKGKSLKDRRKKALERISPENIFKDKNNRIKEFAKGISAYSGANLTDGDFDGAKEELDHIIPRSHKKYGTLNDEANLICVTRGDNKNKGNRIFCLRDLANNYKLKQFETTDDLEIEKKIADTIWDANKKDFKFGNYRSFINLTPQEQKAFRHALFLADENPIKQAVIRAINNRNRTFVNGTQRYFAEVLANNIYLRAKKENLNTDKISFDYFGIPTIGNGRGIAEIRQLYEKVDSDIQAYAKGDKPQASYSHLIDAMLAFCIAADEHRNDGSIGLEIDKNYSLYPLDKNTGEVFTKDIFSQIKITDNEFSDKKLVRKKATEGFNTHRQMTRDGIYAENYLPILIHKELDEVRKGYTWKNSEEIKIFKGKKYDIQQLNNLLYCLKFVDKPISIDIQISTLEELRNILTTNNIAATAEYYYINLKTQKLHEYYIENYNTALGYKKYTKEMEFLRSLAYRSERVKIKSIDDVKQVLDKDSNFIIGKITLPFKKEWQRLYREWQNITIKDDYEFLKSFFNVKSITKLHKKVRKDFSLPISTNEGKFLVKRKTWDNNFIYQILNDSDSRVDGTKPFIPAFDISKNEIVEAIIDSFTSKNIFWLPKNIELQKVDNKNIFAIDTSKWFEVETPSDLRDIGVATIQYKIDNNSRPKVRVKLDYVIDDDSKINYFTNHSLLKSRYPDKVLEILKQSTIIEFESSGFNKTIKEMLGMTLAGIYNETSNN

SEQ ID NO: 962 - protein, 1646 aa, Unknown
  Francisella cf. novicida 3523
MNIKILPIAIDLGAKNTGVFSAFYQKGTSLESLDNKNGKVYELSKDSYTLLMNNRTARRHQRRGIDRKQLVKRLFKLIWTKQLNLEWNKDTQQTISFLLNRRGFSFITDGYSPEYLNIAPEAVKAILMSILDDYNGEDDLDSYLQSATENDSKIDELYNKLLQKALEFKLRKLCIDIKEDKVTTKTLKELSNTEFKLLANYLVDYDRILRTQKFSYTDKQGNLRELNYYHHDKYNIQEFLKRNIIINDVILEKLTDDLDIWNLNFDKFDFEKNLEKLENQEDKDYLQTHLHHFVFAVNKIKSEMASGGRHRSQYFQEITNVLVENNHQEGYLKNFCENLHNKKYSNLSVKNLVNLIGNLSNLELKPLRKYFNDKIHAKADYWDEQKFAETYSDWILGEWRVGAKDKDKKDGAKYSYKNLCDELKQKVGINQDGIINQTKSDFVDFLLELDPCRTIPPYLDNNNRKPPKCQSLILNPKFLDNKYPNWQQYLQELKKLQTVQNYLGNFEIDLKDLKSSKEQPYFVKYKSLNQQIASGQRDYKDLDARVLQFIFDRVKASDELLLNEIYSHAKKLKQNTSSELEKLELCKKLDEVIANSQLSQILKSQHVNGIFEQGTFLHLVCKYYKQRQRARDSRLYIMPEYRYDKKLDKYNNTGRFDDDNQLLTYCNHKPRQKRYQLLNDLAGVLQVSPNFLKDKIGSDDDLFISKWLVEHIRGFKKACEDSLKIQKDNRGLLNHKINIARNTKGKCEKEIFNLICKIEGSEDKKGNYKHGLAYELGVLLFGEPNQASKLEFDRKIKKFNSIYSFAQIQQIAFAERKGNANTCAVCSADNAHRMQQIKVAKPVEGNKDNIILSAKAQRLPAIPTRIVDGAVKKIATILARNIVDDNWDNIKQALSNNQQLHVPIITESNAFEFEPALADIKGKSLKDKRKKALERIDPENVFKDKNNRIKEFAKGISAYSDANLANGDFDGAKEELDHIIPRSHKKYGTLNDEANLICVTREDNQNRGNKAVFLYDLKPNYKLKQFNTTDDLEIEKKIADTIWDASKQDFKFGNYRSFINLTPQEQIAFRHALFLADKNPIKKAVIRAIDNRNRTFVNGTQRYFAEVLANNIYLRAKKENLATNRITFDYFGIETTNSNGRGIADVRKLYEKVDSDIQAYAKGDKPQDSYSHLIDAMIAFCVAADEHKNEGSIGLKMGNQYGLFPTPDKYDENTGEIISWHNDDIFRKIKVSDNQFSDKKLVRKKATEGFNTHRQMTRDGIYGESYLPILIHKNLNEVRKGYNWENSEEIKIFKGKKYDIQQLNNLVYCLKFVDKPISIDIQITTLEELRNILETNNISTTAEYYYINLKTQKLHEYYIENYNTALGYKKYTKEMEFLRSLAYRTERVKIKSIDDVSMILAKDSNFKAGKIELPFKTEWQRLYLEWQNTTIKDNHEFLKSYFSVKNATKQHKKVRKDFSLPISTNEGKLLVKRKTWDNNFIYQILNDSDSRADGTKPFIPAFDISKNEIVETIIKSFTSKNIFWLPKNIELQKVDNKSIFAIDTSRWFEVETPKDLIEIGVSTIQYKIDNNSRPKVRVKLDYVMDDDSKINYFMNHSLLKSRYPDKVLEILKQSTIIEFESSGFNKTIKEMLGMTLAGIYNETSNN

SEQ ID NO: 963 - protein, 1629 aa, Francisella novicida
MNFKILPIAIDLGVKNTGVFSAFYQKGTSLERLDNKNGKVYELSKDSYTLLMNNRTARRHQRRGIDRKQLVKKLFKLIWTEQLNLEWDKDTQQAISFLFNRRGFSFITDGYSPEYLNIVPEQVKAILMDIFDDYNGEDDLDSYLKLATEQESKISEIYNKLMQKILEFKLRKLCTDIKDDKVSTKTLKEITSYEFELLADYLANYSESLKTQKFSYTDKQGNLKELSYYHHDKYNIQEFLKRHATINDEILDTLLTDDLDIWNFNFEKFDFDKNEEKLQNQEDKDHTQAHLHHFVFAVNKIKSEMASGGRHRGQYFQEITNVLDENNHQEGYLKNFCENLHNKKYSNLSVKNLVNLIGNLSNLELKPLRKYFNDKIHAKADHWDEQKFTETYCHWILGEWRVGLKDQDKKEGAKYSYKDLCNELKQKVTNAGLIDFLLELDPCRTIPPYLDNNNRKPPKCQSLILNPKFLDNQYPNWQQYLQELKKLQIIQDYLESFETDLKVLKSSKDQPYFVEYKSSNQQIASGQRDYKDLDARILQFIFDRVKASDELLLNEIYFQAKKLKQKASSELEKLESSKKLDEVIANSQLSKILKSQHTNGIFEQGTFLHLVCKYYKQRQRARDSRLYIMPEYRYDKKLDKYNNTGRFDDDNQLLTYCNHKPRQKRYQLLNDLAGVLQVSPNFLKDKIGSDDDLFISKWLVEHIRGFKKACEDSLKIQKDNRGLLNHKINIARNTKGKCEKEIFNLICKIEGSEDKKGNYKHGLAYELGVLLFGEPNEASKPEFDRKIKKFNSIYSFAQIQQIAFAERKGNANTCAVCSADNAHRMQQIKITEPVEDNKDKIILSAKAQRLPAIPTRIVDGAVKKMATILAKNIVDDNWQNIKQVLSAKHQLHIPIITESNAFEFEPALADVKGKSLKDRRKKALERISPENIFKDKNNRIKEFAKGISAYSGANLTDGDFDGAKEELDHIIPRSHKKYGTLNDEANLICVTRDDNKNKGNRIFCLHDLANNYKLKQFETTDDLEIEKKIADTIWDASKKDFKFGNYRSFINLTPQEQKAFRHALFLADENPIKQAVIRAINNRNRTFVNGTQRYFAEVLANNIYLRAKKENLNTDKISFDYFGIPTIGNGRGIAEIRQLYEKVDSDIQVYAKGDKPQASYSHLIDAMLAFCIAADEHRNDGSIGLEIDKNYSLYPLDKNTGEVFTKDIFSQIKITDNEFSDKKLVRKKATEGFNTHRQMTRDGIYAENYLPILIHKELDEVRKGYTWKNSEEIKIFKGKKYDIQQLNNLLYCLKFVDKPISIDIQISTLEELRNILTTNNIAATAEYYYINLKTQKLHEYYIENYNTALGYKKYTKEMEFLRSLAYRSERVKIKSIDDVKQVLDKDSNFIIGKITLPFKKEWQRLYREWQNTTIKDDYEFLKSFFNVKSITKLHKKVRKDFSLPISTNEGKFLVKRKTWDNNFIYQILNDSDSRVDGTKPFIPAFDISKNEIVEAIIDSFTSKNIFWLPKNIELQKVDNKNIFAIDTSKWFEVETPSDLRDIGVATIQYKIDNNSRPKVRVKLDYVIDDDSKINYFTNHSLLKSRYPDKVLEILKQSTIIEFESSGFNKTIKEMLGMTLAGIYNETSNN

SEQ ID NO: 964 - protein, 1629 aa, Francisella novicida
MNFKILPIAIDLGVKNTGVFSAFYQKGTSLERLDNKNGKVYELSKDSYTLLMNNRTARRHQRRGIDRKQLVKRLFKLIWTEQLNLEWDKDTQQAISFLFNRRGFSFITDGYSPEYLNIVPEQVKAILMDIFDDYNGEDDLDSYLKLATEQESKISEIYNKLMQKILEFKLMKLCTDIKDDKVSTKTLKEITSYEFELLADYLANYSESLKTQKFSYTDKQGNLKELSYYHHDKYNIQEFLKRHATINDRILDTLLTDDLDIWNFNFEKFDFDKNEEKLQNQEDKDHIQAHLHHFVFAVNKIKSEMASGGRHRSQYFQEITNVLDENNHQEGYLKNFCENLHNKKYSNLSVKNLVNLIGNLSNLELKPLRKYFNDKIHAKADHWDEQKFTETYCHWILGEWRVGVKDQDKKDGAKYSYKDLCNELKQKVTKAGLVDFLLELDPCRTIPPYLDNNNRKPPKCQSLILNPKFLDNQYPNWQQYLQELKKLQSIQNYLDSFETDLKVLKSSKDQPYFVEYKSSNQQIASGQRDYKDLDARILQFIFDRVKASDELLLNEIYFQAKKLKQKASSELEKLESSKKLDEVIANSQLSQILKSQHTNGIFEQGTFLHLVCKYYKQRQRARDSRLYIMPEYRYDKKLHKYNNTGRFDDDNQLLTYCNHKPRQKRYQLLNDLAGVLQVSPNFLKDKIGSDDDLFISKWLVEHIRGFKKACEDSLKIQKDNRGLLNHKINIARNTKGKCEKEIFNLICKIEGSEDKKGNYKHGLAYELGVLLFGEPNEASKPEFDRKIKKFNSIYSFAQIQQIAFAERKGNANTCAVCSADNAHRMQQIKITEPVEDNKDKIILSAKAQRLPAIPTRIVDGAVKKMATILAKNIVDDNWQNIKQVLSAKHQLHIPIITESNAFEFEPALADVKGKSLKDRRKKALERISPENIFKDKNNRIKEFAKGISAYSGANLTDGDFDGAKEELDHIIPRSHKKYGTLNDEANLICVTRGDNKNKGNRIFCLRDLADNYKLKQFETTDDLEIEKKIADTIWDANKKDFKFGNYRSFINLTPQEQKAFRHALFLADENPIKQAVIRAINNRNRTFVNGTQRYFAEVLANNIYLRAKKENLNTDKISFDYFGIPTIGNGRGIAEIRQLYEKVDSDIQAYAKGDKPQASYSHLIDAMLAFCIAADEHRNDGSIGLEIDKNYSLYPLDKNTGEVFTKDIFSQIKITDNEFSDKKLVRKKAIEGFNTHRQMTRDGIYAENYLPILIHKELNEVRKGYTWKNSEEIKIFKGKKYDIQQLNNLVYCLKFVDKPISIDIQISTLEELRNILTTNNIAATAEYYYINLKTQKLHEYYIENYNTALGYKKYSKEMEFLRSLAYRSERVKIKSIDDVKQVLDKDSNFIIGKITLPFKKEWQRLYREWQNTTIKDDYEFLKSFFNVKSITKLHKKVRKDFSLPISTNEGKFLVKRKTWDNNFIYQILNDSDSRVDGTKPFIPAFDISKNEIVEAIIDSFTSKNIFWLPKNIELQKVDNKNIFAIDTSKWFEVETPSDLRDIGVATIQYKIDNNSRPKVRVKLDYVIDDDSKINYFTNHSLLKSRYPDKVLEILKQSTTIEFESSGFNKTIKEMLGMTLAGIYNETSNN

SEQ ID NO: 965 - protein, 244 aa, Francisella tularensis
ARKQNSEIYNKLMQKILEFKLRKLCTDIKDDKVSTKTLKEITSYEFELLADYLANYSESLKTQKFSYTDKQGNLKELSYYHHDKYNIQEFLKRHATINDEILDTLLTDDFDIWNFNFEKFDFDKNEEKLQNQEDKDHTQAYLHHFVFAVNKIKSEMASGGRHRSQYFQEITNVLDENNHQEGYLKNFCENLHNKKYSNLSVKNLVNLVGNLSNLELKPLRKYFNDKNLIIGMSKSLQKLIATGY

SEQ ID NO: 966 - protein, 501 aa, Francisella tularensis
MEIEKKIADTIWDASKQDFKFGNYRSFINLTPQEQKAFRYALFLADENSIKQAVIRAINNRNRTFVNGTQRYFAEVLANNIYLRAKKENLNTDKISFDYFGIPTIGNGRGIADIRQLYEKVDSDIQAYAKGDKPQASYSHLIDAMIAFCVAADEHRNDGSIGLEIDKNYSLYLLDKNTGEVFTKDIFSQIKITDNEFSDKKLVRKKATEGFNTHRQMTRDGIYAENYLPILIHKELDEVRKGYTWGNSEELKIHKGKKYNIQQLNNIVYCLKFIDKSISIDIQISTLEELRNILTTNNIAATAEYYYINLKNQKLHEYYIENYNTALDYKKYSKEMEFLRSLAYRSERVKIKSIDDVKQVLDKDSNFIIGKITLPFKKEWQRLYLEWQNTTIKDDYEFLKSFFNVKSITKLHKKVRKDFSLPISTNEGKFLVKRKTWDNNFIYQILNDSDSRVDGTKPFIPAFDISKNEIVEAIIDSFTSKNIFWLPKNIELQNVDKIFLL

SEQ ID NO: 967 - protein, 158 aa, Francisella tularensis
MIDFLLELDPCITIPPYLDNNNRKPPKCQSLILNPKFLDNQYPNWQQYLQELKKLQSIQDYLDSFETDLKDLKSSKDQPYFVEYKSSNQQMASGQRDYKDLDARILQFIFDRVKASDELLLNEIYFQAKKLKQKASSELEKLESSKKLDEVIANSQLS

SEQ ID NO: 968 - protein, 878 aa, Francisella tularensis
MLNDLAGVLQVSRNQLLSSVEEWFQQAQRVGEISKSQDEQIFEWLKSFKIASYCKAAVEMQKQYRGTLKNAIQTAIFRQSENINKNKNKNKNTGNQQQALSENSKDVKSLTADEKKLLKLIENIAKASQKIGESLGLNDKQIKKFNSIYNFAQIQQIAFAERKGNANTCAVYSADNAHRMQQIKITELVEDNKDNIILSAKAQRLPAIPTRIVDGAVKKMATILAKNIVDDNWQNIKQVLSAKHQLHIPIITESNAFEFEPALADVKGKSLKDRRKKALERISPENIFKDKNNRIKEFAKGISAYSGANLTDGDFDGAKEELDHIIPRSYKKYGTLNDEVNLICVTRDDNKNKGKRIFCLNDLANNYKLKQFETTDDLEIEKKIADTIWDASKQDFKFGNYRSFINLIPQEQKAFRYALFLADENSIKQAVIRAINNRNRTFVNGTQRYFAEVLANNIYLRAKKENLNTDKISFDYFGIPTIGNGRGIADIRQLYEKVDSDIQAYAKGDKPQASYSHLIDAMIAFCVAADEHRNDGSIGLEIDKNYSLYPLDKNTGEVFTKDIFSQIKITDNEFSDKKLVRKKATEGFNTHRQMTRDGIYAENYLPILIHKELDEVRKGYTWGNSEELKIHKGKKYNIQQLNNIVYCLKFIDKSISIDIQISTLEELRNILTTNNIAATAEYYYINLKNQKLHEYYIENYNTALDYKKYSKEMEFLRSLAYRSERVKIKSIDDVKQVLDKDSNFIIGKITLPFKKEWQRLYLEWQNTTIKDDYEFLKSFFNVKSINKLHKKVRKDFSLPISTNEGKFLVKRKTWDNNFIYQILNDSDSRVDGTKPFIPAFDISKNEIVEAIIDSFTSKNIFWLPKNIELQKVDKIFLL

SEQ ID NO: 969 - protein, 292 aa, Francisella tularensis
MLNDLAGVLQVSRNQLLSSVEEWFQQAQRVGEISKSQDEQIFEWLKSFKIASYCKAAVEMQKQYRGTLKNAIQTAIFRQSENINKNKNKNTGNQQQALSENSKDVKSLTADEKKLLKLIENIAKASQKIGESLGLNDKQIKKFNSIYNFAQIQQIAFAERKGNANTCAVYSADNAHRMQQIKITELVEDNKDNIILSAKAQRLPAIPTRIVDGAVKKMVTILAKNIVDDNWQNIKQVLSAKHQLHIPIITESNAFEFEPALADVKGKSLKDRRKKALERISPENIFKDKNIC

SEQ ID NO: 970 - protein, 53 aa, Francisella tularensis
MNHSLLKSRYPDKVLEILKQSTIIEFESSGFNKTIKEMLGMTLAGIYNETSNN

SEQ ID NO: 971 - protein, 393 aa, Francisella tularensis
MNVKILPIAIDLDVKNTGVFSAFYQKGTSLEKLDNKNGKVYELSKDSYTLLMNNRTAQRHQRRGIDRKQLVKRLFKLVWTEQLNLEWDKDTQQAISFLFNRRGFSFITDGYSTEYLNIVPEQVKAILMDIFDDYNGEDDLDSYLKLATEQESKISEIYNKLMQKILEFKLRKLCTDIKDDKVSTKTLKEITSYEFELLADYLANYSESLKTQKFSYTDKQGNLKELSYYHHDKYNIQEFLKRHATINDEILDTLLTDDFDIWNFNFEKFDFDKNEEKLQNQEDKDHTQAYLHHFVFAVNKIKSEMASGGRHRSQYFQEITNVLDENNHQEGYLKNFCENLHNKKYSNLSVKNLVNLVGNLSNLELKPLRKYFNDKNLIIGMSKSLQKLIATGY

SEQ ID NO: 972 - protein, 1629 aa, Francisella tularensis
MNVKILPIAIDLGVKNTGVFSAFYQKGTSLERLDNKNGKVYELSKDSYTLLMNNRTARRHQRRGIDRKQLVKRLFKLIWTEQLNLEWDKDTQQAISFLFNRRGFSFITDGYSPEYLNIVPEQVKAILMDIFDDYNGEDDLDSYLKLATEQESKISEIYNKLMQKILEFKLRKLCTDIKDDKVSTKTLKEITSYEFELLADYLANYSEILKTQKFSYTDKQGNLKELSYYHHDKYNIQEFLKRHATINDEILDTLLTDDLDIWNFNFEKFDFDKNEEKLQNQEDKDHTQAHLHHFVFAVNKIKSEMASGGRHRGQYFQEITNVLDENNHQEGYLKNFCENLHNKKYSNLSVKNLVNLIGNLSNLELKPLRKYFNDKIHAKADHWDEQKFTETYCHWILGEWRVGVKDQDKKDGAKYSYKDLCNELKQKVTKAGLVDFLLELDPCRTIPPYLDNNNRKPPKCQSLILNPKFLDNQYPNWQQYLQELKKLQSIQNYLESFETDLKVLKSSKDQPYFVEYKSSNQQIASGQRDYKDLDARILQFIFDRVKASDELLLNEIYFQAKKLKQKASSELEKLESSKKLDEVIANSQLSQILKSQHTNGIFEQGTFLHLVCKYYKQRQRARDSRLYIMPEYRYDKKLDKYNNTGRFDDDNQLLTYCNHKPRQKRYQLLNDLAGVLQVSPNFLKDKIGSDDDLFISKWLVEHIRGFKKACEDSLKIQKDNRGLLNHKINIARNTKGKCEKEIFNLICKIEGSEDKKGNYKHGLAYELGVLLFGEPNEASKPEFDRKIKKFNSIYSFAQIQQIAFAERKGNANTCAVCSADNAHRMQQIKITEPVEDNKDKIILSAKAQRLPAIPTRIVDGAVKKMATILAKNIVDDNWQNIKQVLSAKHQLHIPIITESNAFEFEPALADVKGKSIKDRRKKALERISPENIFKDKNNRIKEFAKGISAYSGDNLASGDFDGAKEELDHIIPRSHKKYGTLNDEANLICVTRDDNKNKGNRIFCLHDLANNYKLKQFETTDDLEIEKKIADTIWDASKKDFKFGNYRSFINLTPQEQKAFRHALFLADENPIKQAVIRAINNRNRTFVNGTQRYFAEVLANNIYLRAKKENLNTDKISFDYFGIPTIGNGRGIVEIRQLYEKVDSDIQAYAKGDKPQASYSHLIDAMLAFCIAADEHRNDGSIGLEIDKNYSLYPLDKNTGEVFTKDIFSQIKITNNEFSDKKLVRKKATEGFNTHRQMTRDGIYAENYLPILIHKELDEVRKGYTWGNSEELKIHKGKKYDIQQLNNLVYCLKFIDKSISIDIQISTLEELRNILTTNNIATTAEYYYINLKTQKLHEYYIENYNTALGYKKYTKEMEFLRSLAYRSERVKIKSIDDVKQVLDKDSNFIIGKITLPFKKEWQRLYREWQNTTIKDDYEFLKSFFNVKSITKLHKKVRKDFSLPISTNEGKFLVKRKTWDNNFIYQILNDSDSRVDGTKPFIPAFDISKNEIVEAIIDSFTSKNIFWLPKNIELQKVDNKNIFAIDTSKWFEVETPSDLRDIGVATIQYKIDNNSRPKVRVKLDYVIDDDSKINYFTNHSLLKSRYPDKVLEILKQSTIIEFESSGFNKTIKEMLGMTLAGIYNETSNN

SEQ ID NO: 973 - protein, 285 aa, Francisella tularensis
MTRDGIYAENYLPILIHKELDEVRKGYTWGNSEELKIHKGKKYNIQQLNNIVYCLKFIDKSISIDIQISTLEELRNILTTNNIAATAEYYYINLKNQKLHEYYIENYNTALDYKKYSKEMEFLRSLAYRSERVKIKSIDDVKQVLDKDSNFIIGKITLPFKKEWQRLYLEWQNTTIKDDYEFLKSFFNVKSITKLHKKVRKDFSLPISTNEGKFLVKRKTWDNNFIYQILNDSDSRVDGTKPFIPAFDISKNEIVEAIIDSFTSKNIFWLPKNIELQKVDKIFLL

SEQ ID NO: 974 - protein, 1323 aa, Fructobacillus fructosus
MVYDVGLDIGTGSVGWVALDENGKLARAKGKNLVGVRLFDTAQTAADRRGFRTTRRRLSRRKWRLRLLDELFSAEINEIDSSFFQRLKYSYVHPKDEENKAHYYGGYLFPTEEETKKFHRSYPTIYHLRQELMAQPNKRFDIREIYLAIHHLVKYRGHFLSSQEKITIGSTYNPEDLANAIEVYADEKGLSWELNNPEQLTEIISGEAGYGLNKSMKADEALKLFEFDNNQDKVAIKTLLAGLTGNQIDFAKLFGKDISDKDEAKLWKLKLDDEALEEKSQTILSQLTDEEIELFHAVVQAYDGFVLIGLLNGADSVSAAMVQLYDQHREDRKLLKSLAQKAGLKHKRFSEIYEQLALATDEATIKNGISTARELVEESNLSKEVKEDTLRRLDENEFLPKQRTKANSVIPHQLHLAELQKILQNQGQYYPFLLDTFEKEDGQDNKIEELLRFRIPYYVGPLVTKKDVEHAGGDADNHWVERNEGFEKSRVTPWNFDKVFNRDKAARDFIERLTGNDTYLIGEKTLPQNSLRYQLFTVLNELNNVRVNGKKFDSKTKADLINDLFKARKTVSLSALKDYLKAQGKGDVTITGLADESKFNSSLSSYNDLKKTFDAEYLENEDNQETLEKIIEIQTVFEDSKIASRELSKLPLDDDQVKKLSQTHYTGWGRLSEKLLDSKIIDERGQKVSILDKLKSTSQNFMSIINNDKYGVQAWITEQNTGSSKLTFDEKVNELTTSPANKRGIKQSFAVLNDIKKAMKEEPRRVYLEFAREDQTSVRSVPRYNQLKEKYQSKSLSEEAKVLKKTLDGNKNKMSDDRYFLYFQQQGKDMYTGRPINFERLSQDYDIDHIIPQAFTKDDSLDNRVLVSRPENARKSDSFAYTDEVQKQDGSLWTSLLKSGFINRKKYERLTKAGKYLDGQKTGFIARQLVETRQIIKNVASLIEGEYENSKAVAIRSEITADMRLLVGIKKHREINSFHHAFDALLITAAGQYMQNRYPDRDSTNVYNEFDRYTNDYLKNLRQLSSRDEVRRLKSFGFVVGTMRKGNEDWSEENTSYLRKVMMFKNILTTKKTEKDRGPLNKETIFSPKSGKKLIPLNSKRSDTALYGGYSNVYSAYMTLVRANGKNLLIKIPISIANQIEVGNLKINDYIVNNPAIKKFEKILISKLPLGQLVNEDGNLIYLASNEYRHNAKQLWLSTTDADKIASISENSSDEELLEAYDILTSENVKNRFPFFKKDIDKLSQVRDEFLDSDKRIAVIQTILRGLQIDAAYQAPVKIISKKVSDWHKLQQSGGIKLSDNSEMIYQSATGIFETRVKISDLL

SEQ ID NO: 975 - protein, 1367 aa, Unknown
  Fusobacterium sp. 3_1_36A2
MKKQKFSDYYLGFDIGTNSVGWCVTDLDYNVLRFNKKDMWGSRLFDEAKTAAERRVQRNSRRRLKRRKWRLNLLEEIFSDEIMKIDSNFFRRLKESSLWLEDKNSKEKFTLFNDDNYKDYDFYKQYPTIFHLRDELIKNPEKKDIRLIYLALHSIFKSRGHFLFEGQNLKEIKNFETLYNNLISFLEDNGINKSIDKDNIKKLEKIICDSGKGLKDKEKEFKEIFNSDKQLVAIFKLSVGSSVSLNDLFDTDEYKKEEVEKEKISFREQIYEDDKPIYYSILGEKIELLDIAKSFYDFMVLNNILSDSNYISEAKVKLYEEHKKDLKNLKYIIRKYNKENYDKLFKDKNENNYPAYIGLNKEKGKKEVVEKSGLKIDDLIKVIKGYLPKPERIEEKDKTIFNEILNKIELKTILPKQRISDNGTLPYQIHEVELEKILENQSKYYDFLNYEENGVSTKDKLLKTFKFRIPYYVGPLNSYHKDKGGNSWIVRKEEGKILPWNFEQKVDIEKSAEEFIKRMTNKCTYLNGEDVIPKDSFLYSEYIILNELNKVQVNDEFLNEENKRKIIDELFKENKKVSEKKFKEYLLVNQIANRTVELKGIKDSFNSNYVSYIKFKDIFGEKLNLDIYKEISEKSILWKCLYGDDKKIFEKKIKNEYGDILNKDEIKKINSFKFNTWGRLSEKLLTGIEFINLETGECYSSVMEALRRTNYNLMELLSSKFTLQESIDNGNKEMNEVSYRDLIEESYVSPSLKRAILQTLKIYEEIKKITGRVPKKVFIEMARGGDETMKNKKIPARQEQLKKLYDSCGNDIANFSIDIKKMKSSLSSYDNNSLRQKKLYLYYLQFGKCMYTGREIDLDRLLQNNDTYDIDHIYPRSKVIKDDSFDNLVLVLKNENAEKSNEYPVKKEIQEKMKSFWRFLKEKNFISDEKYKRLTGKDDFELRGFMARQLVNVRQTTKEVGKILQQIEPEIKIVYSKAEIASSFREMFDFIKVRELNDTHHAKDAYLNIVAGNVYNTKFTEKPYRYLQEIKENYDVKKIYNYDIKNAWDKENSLEIVKKNMKKNTVNITRFIKEEKGQLFDLNPIKKGETSNEIISIKPKLYNGKEEKLNEKYGYYKSLNPAYFLYVEHKEKNKRIKSFERVNLVDVNNIKDEKSLVKYLIENKKLVEPRLIKKVYKRQVILINDYPYSIVALDSNKLMDFENLKPLFLENKYEKILKNVIKFLEDNQGKSEENYKFIYLKKKDRYEKNETLESVKDRYNLEFNEMYDKFLEKLDSKDYKNYINNKKYKNLLDVKEKFIKLNLFDKAFTLKSFLDLFNRKTMADFSKVGLTKYLGKIQKISSNVLSKNELYLLEESVTGLFVKKIKL

SEQ ID NO: 976 - protein, 1367 aa, Unknown
  Fusobacterium sp. 3_1_27
MKKQKFSDYYLGFDIGTNSVGWCVTDLDYNVLRFNKKDMWGSRLFDEAKTAAERRVQRNSRRRLKRRKWRLNLLEEIFSDEIMKIDSNFFRRLKESSLWLEDKNSKEKFTLFNDDNYKDYDFYKQYPTIFHLRDELIKNPEKKDIRLIYLALHSIFKSRGHFLFEGQNLKEIKNFETLYNNLISFLEDNGINKSIDKDNIKKLEKIICDSGKGLKDKEKEFKEIFNSDKQLVAIFKLSVGSSVSLNDLFDTDEYKKEEVEKEKISFREQIYEDDKPIYYSILGEKIELLDIAKSFYDFMVLNNILSDSNYISEAKVKLYEEHKKDLKNLKYIIRKYNKENYDKLFKDKNENNYPAYIGLNKEKGKKEVVEKSGLKIDDLIKVIKGYLPKPERIEEKDKIIFNEILNKIELKTILPKQRISDNGTLPYQIHEVELEKILENQSKYYDFLNYEENGVSTKDKLLKTFKFRIPYYVGPLNSYHKDKGGNSWIVRKEEGKILPWNFEQKVDIEKSAEEFIKRMTNKCTYLNGEDVIPKDSFLYSEYIILNELNKVQVNDEFLNEENKRKIIDELFKENKKVSEKKFKEYLLVNQIANRTVELKGIKDSFNSNYVSYIKFKDIFGEKLNLDIYKEISEKSILWKCLYGDDKKIFEKKIKNEYGDILNKDEIKKINSFKFNTWGRLSEKLLTGIEFINLETGECYSSVMEALRRTNYNLMELLSSKFTLQESIDNGNKEMNEVSYRDLIEESYVSPSLKRAILQTLKIYEEIKKITGRVPKKVFIEMARGGDETMKNKKIPARQEQLKKLYDSCGNDIANFSIDIKKMKSSLSSYDNNSLRQKKLYLYYLQFGKCMYTGREIDLDRLLQNNDTYDIDHIYPRSKVIKDDSFDNLVLVLKNENAEKSNEYPVKKEIQEKMKSFWRFLKEKNFISDEKYKRLTGKDDFELRGFMARQLVNVRQTTKEVGKILQQIEPEIKIVYSKAEIASSFREMFDFIKVRELNDTHHAKDAYLNIVAGNVYNTKFTEKPYRYLQEIKENYDVKKIYNYDIKNAWDKENSLEIVKKNMKKNTVNITRFIKEEKGQLFDLNPIKKGETSNEIISIKPKLYNGKEEKLNEKYGYYKSLNPAYFLYVEHKEKNKRIKSFERVNLVDVNNIKDEKSLVKYLIENKKLVEPRLIKKVYKRQVILINDYPYSIVALDSNKLMDFENLKPLFLENKYEKILKNVIKFLEDNQGKSEENYKFIYLKKKDRYEKNETLESVKDRYNLEFNEMYDKFLEKLDSKDYKNYINNKKYKNLLDVKEKFIKLNLFDKAFTLKSFLDLFNRKTMADFSKVGLTKYLGKIQKISSNVLSKNELYLLEESVTGLFVKKIKL

SEQ ID NO: 977 - protein, 1367 aa, Unknown
  Fusobacterium sp. 1_1_41FAA
MKKQQFSDYYLGFDIGTNSVGWCVTDFNYNVLRFNKKDMWGSRLFDEAKTAAERRVQRNSRRRLKRRKWRLNLLEEIFSDEILKIDSNFFRRLKESSLWLEDKSSKEKFTLFNDDNYKDYDFYKQYPTIFHLRNELIKNPEKKDIRLVYLALHSIFKSRGHFLFEGQNLKDIKNFETLYNNLMAFLEDNDIYKNIDSSYIGNLENIICDSKKGLKDKEKEFKEIFNSDKQLVGFFKLSVGSSVSLNDLFDTDEYKKGEVEKEKISFREQIYEDDKPIYYSILGEKIEFLDIAKSFYDFMVLNNILADSQYISEAKVKLYDEHKRDLKNLKYIIRKYNKENYDKLFKDKNESNYSAYIGLNKEKGKKEVIEKSRLKIDDFAKIIKGYLPKAEKIDEKDRSIFNEILDKIELKTILPKQRISDNGTLPYQIHEAELEKILENQAKYYDFLNHEENGISTKDKLLMTFKFRIPYYVGPLNSYHKNKGGNSWIVRKEEGKILPWNFEQKVDIEKSAEEFIKRMTNKCTYLNGEDVIPKDSFLYSEYIILNELNKVQVNDEFLNKEIKKKIIEDLFKKSKKISEKNFREYLLVNQITNKTVELKGVKDAFNSNYVSYIKFKDIFGDKLNLDIYKEISEKSILWKCLYGDDKKIFEKKIKSVYGDILTKDEIKKINSFKFNTWGRLSEKLLTEIEFIDLETGECYSSVMDALRRTNYNLMELLSSKFTLQENIDNENKEVSEFSYRDLVEESYVSPSLKRAILQTLKIYEEIRKITGRIPKKVFIEMARGGDETMKNKKIPARQEQLKKLYDSCGKDISNFSIDIKEMKNSLNSYDNNSLRQKKLYLYYLQFGKCMYTGKEIDLNRLLQNNDTYDIDHIYPRSKVIKDDSFDNLVLVLKNENAEKSNEYPLKKEIQEKMKSFWKFLKEKNFISDEKYKRLTGKDEFELRGFMARQLVNVRQTTKEAGKILQQIEPEIKIVYSKAEIASSFREMFDFIKVRELNDTHHAKDAYLNIVAGNVYNTKFTEKPYRYLQEIKENYDVKKIYNYDIKNAWDKEKSLEIVKKNMEKNTVNITRFIKEEKGQLFDLNPIRKGETSNEIIAIKPKFYEGSTEKLNEKYGYYKSLNPAYFIYVEHKEKNKIIRSFERVNLVDVNKIKDEKSLIKYLIENKGLIEPKVIKKVYKRQVILINNFPYSIVALDSNKLMDFENLKPLFLERKYEKILKNAIKFLEDNQGKTEEYYKFLYLKKKDRNEKNETIDSVKERYNIEFNEMYDKFLEKLDSKDYKNYINNKKYSELVNVKEKFIKLNLFDKAFTLKSFLDLFNRKTMADFSKVGLTKYLGKIQKISSNVLSKNELHLLEESVTGLFVKKIKL

SEQ ID NO: 978 - protein, 1391 aa, Unknown
  Galbibacter sp. ck-I2-15
MKTILGLDLGTNSIGWALVKEAENENEVSDIIKLGVRVNPLTVDELTNFEGGKAYSNNAERTLKRGARRNLQRYKLRRENLIEILLKNGLINKDTALTEVGKETTHQTLKLRSKSANEKVSLEDLAKILLSINKKRGYKSSRKVNAEDDGVAIDGMEVAKLLYDENMTPGEYVLRLLESGKKHLPDFYRSDLQEEFNLVWKKQSEFYPLILTKELFFELHGKNKSQTWAICKEPLGIVGVKLKGSAKEQKFARYRLRKEALTQQIELEHLAIVLQDINNDSNKSSGYLGAISDRSKELFFNKETVGQYQYKQLQKDPNTSLKNQVFYRQDYLDEFEVIWRNQAKFYPQLTNELKQEIRDVVIFYQRKLKSQKNLISFCQFESTQQNYVEKETGKTKIRTIGRRVIPRSSPLFQEFKIWQSLNNLKFVNSESNQIIQFIELEDDVKKVVFDELNLRGDLKPNQVLKILSKYMKIGKLTQWKCNLEEIEGNRTNSALYNVFQMIAEEEGYGFNWGKKSALEIKSELKAIFSSIGINDSILDFDFSKKLDQQLSYQLWHLLYSAEEGNSKITEEDKFTYGNTGVALKKKLHLKFGFKPEYSTLISNLRFTSDYGNLSSKAISKILPFLRDGSDYSKACQYAGYNHSNSLSADELDNRELKPKLELLKKNSLRNPVVEKILNQMVNVVNQVIDNYGKPDEVRIELARELKKSAKERSQMTKNISDATRRNAEIKKYLSKEFGIPNPTKGDVIRYRLWEELASNGYKDLFRDKYIPKEKLFSNEIDIEHIIPKALLFDDSFSNKTLAFKVDNLKKADRTAFDFMSTDFSKDVDSYIGRIETLHKDGKISSSKYKKLMIPKSKLVDGFIERDLRNTQYIAKQARKMLLEVFKTVVPTTGKITDKLREDWDLINVMKELNFPKYKALGLTKKIERFDVGSEKIKSINVIEGWSKRNDHRHHAMDALAVAFTTHNHIQYLNYLNARKDIHHEMHGTIKSIENQIIGKDVMGKRRFIPPISDLRMKAKLQIESILISFKNKNKVVTWSVNKTKLKGKDNYNKRRQLTPRGQLHKETVYGKIKLIDPKPLKLNNKFTLVRASMIVDKVHREIVLQHLSKYDNNSEVAFDSKTIKIDPILIEGIGLKEVVCYEDVFKIRKKISGDNFKNEKHLEKVIDEKVKQILKDRVIKFQGNFKEAFSNLEENPIWLNKSKGIAVKSVAIKGVNNAESLHEGKDHFGDQILDKNKKQIPVDFVSTGNNHHVGIYEDKDGNLQERVVSFFEAVTRVNEGLPIIDKTYNSDIGWKFKFTMKQNEMFVFPSDDFDPNEFDLTDGKNAAKISPNLYRVQKIATKNYMFRHHLETVVTNDLEFTYKSIRSTGWLRNLVKVRINHLGEIVYVGEY

SEQ ID NO: 979 - protein, 1186 aa, Gardnerella vaginalis
MEGNISYAIGIDVGLNSVGLAAIRLDDYGEPIRILKAMSVIHDAGIDPNGAKESDTRKAISGVARRVRRLYRQRRRRLQKLDFLLQSLGWPVVENKDLDFSDSFIPWIFRAKLADEYIADEEQRKQMLSVAIRHIARHRGWRNPYQSIKSMMQETEYSEFYNELLKNIEKLAPGVGCEGSTPAQLVRDYLLSQQGKASRRLRITTGGRRKNHPHSLDPVLPRKLMQSDNMLEILNIFNVQHIDDKYVREQIINAVFYAESPRGSAENRVGKDAITGKGKRALKASLAFQKYRIISTISNLRIRENSKERCLTIEEKQNVYKLLTTSIDKSSKRKSAEAPLYTWIDVADCLGIERYKLRGVGSQIGDGESVGNRPPMLNSELAILYANNKSLGQSLITWWLASNRTQEDKEALIEILSNTVDIEAIHDNPEYQDKYGSAIAFIDSMNETEIAALENISLPDGRAAYSLETLDELNKQMLETDDDLFEARKKLFNLPNNWRPAEAPIAEPTGNPSVDRVLKIVHRFLISAKNRWGNPERINIEHVRSGFQSKKMANSYKELLDKRTEGKENLKAMMRNSLHLGTSDSISDADIRRYEAVQRQNGQCLYCGSEITYHTCELDHIVPRKGPGSTNTRENLVATCSSCNAQKCNTPFATWCEQSTYCKNHDISADSAINRVRAFIFPPNSYDKRGANQFKKEVIARLKQKVGDEAFDNRSIESVAWMANELHRRIDWYYNSQNYQTNNGISDISNKAQTNVGVYAGSLTAIARRMSGIDGKLEFFDGRRKTRFDRRHHAVDASVIAMMTPGIAQILAIKCNLRETQLLQGNKVVPGGIDWKEYPTANDQGYQQYANWSVRMNALLKLLNEEMRADRIAVVNSIRLRYSNSSVHQYEVNALLKLHVGDEIDSETIRRSSTPALYCALTRNPDYDVNNGFPENPGRTILLHNKKLNADDSITFFKAQAVQLFVREGSAKIGNSIHHLRIYEYFEKLKSGKIKKSYGMIRVFQNDLHRHIHEDLFSCDLPEQSISMRYADTKVAHAVQTGNANYLGYLVPGDEIIVDFSHITLSENIGKFVEFLNKIGADCTAYRHWVVVGTDTEKVLILKPSMISSEGIDKLYSNCERNNFDYSSYEKSINEILAGKGWRVSVNVLAQYKAATIRRNALGEVRWASRSHLPISWSWDTGENRE

SEQ ID NO: 980 - protein, 1186 aa, Gardnerella vaginalis
MEGNISYAIGIDVGLNSVGLAAIRLDNNGEPIRILKAMSVIHDAGIDPNGAKESDTRKAISGVARRVRRLYRQRRRRLQKLDFLLHSLGFPVVENKDLDFSDSFIPWIFRAKLADEYIADEKQRKQMLSVAIRHIARHRGWRNPYQSIKSMTQETEYSEFYNELLKNIEKFAPGVGCEGSTPAQLVRDYLLLQQGKASRRLRITTDEKRKNHPNSLNPILPRKLMQSDNMLEILNIFNVQHIDDKYVREQIINAVFYAKSPRGSAENRVGKDAITGKGKRALKASLAFQKYRIISTISNLRIRENSKERCLTIEEKQSVYKLLTTSTDESSKEKSAEAPLYTWIDVADCLGIERYKLRGVGSQIGDGESVGNRPPMLNSELAIIYANNKSLGKSLLTWWLDANRTQEDKEALIEILSNTVDIEAIHDNPEYQDKYGSAIAFIDSMDETEIAALENISLPDGRAAYSLETLDKLNKQMLETDDDLFEARKKLFNLPNNWRPSEAPIAEPTGNPSVDRVLKIVHRFLISAKNRWGNPERINIEHVRSGFKSKKMANSYKELLDKRTKGKENLKAMMRNSLHLGMSDSISDADIRRYEAVQRQNGQCLYCGSEITYHTCELDHIVPRKGPGSTNTRENLVATCSLCNAQKCNTPFSTWCEQSTYCKNHDISVDSAINRVRAFIFPPNSYDKRGANQFKKEVIARLKQKVGDEAFDNRSIESVAWMANELHRRIDWYYNSQNYQTNNGISDITNKAQTNVGVYAGSLTAIARRMSGIDGKLEFFDGRRKTRFDRRHHAVDASVIAMMTPGIAQILAIKCNLRETQLLQGNKVVPGGIDWKEYPTANDQGYQQYANWSVRMNALLKLLNEEMRADRIAVVNSIRLRYNNSSVHQYKVNALLKLHVGDEIDSGTIRRSSTPALYCALTRNPDYDVNNGLPENPNRAILLHDKKLNADDSITFFKAQAVQLFVREGSAEIGSSTHHLRIYEYFKKLKSGKIKKSYGMIRVFQNDLHRHIHEDLFSCDLPEQSISMRYADTEVAHAVQTGNSNYLGYLVPGDEIIVDFSHVKLSGNIGTFVEFLNKIGANCAAYNHWVVVGTDTEKVLILKPSMISSEGIDKLYSNCKRNNFDYSSYEKSINEILVGKGWRVSVNVLAKYNAETIRRNALGEVRWTSRSHLPISWSWNTGENRE

SEQ ID NO: 981 - protein, 1258 aa, Gemella haemolysans
MTEENPDIRKVFLAIHHILKNRGHFLLQGQSFKEGNLNNLIKELLNLDILHISIEITEENINKITEIALEKKTLTDKVNDLKKIYPKEKQLLEAFRLIFGGKTSLDKLFAIDEYKELDASVKSVSFKEKIYEEVRHDYEQVLSNYIELLDLAKLVYDSIILSDIKKEGKTLSESKVELYHKHREDLTKLKTLVKNDSKLSEDKKVELYSAIFKEDKDKGTNYVNYIRKSEEGKGCNYEDFKKFLVKELAKLEESSAKEEILRDLELELFLPLQRTKDNSVVPYQIHKEELVKILDNAAKYHKFLNEKDDSGYSIIEKVIQLLEFRIPYYVGPLNSSKKAKVDGFAWSVRNKGYENTPVTPWNYEKVIDESASAEKFITNLTNKCTYLKGEDVLPKSSLLYSEFALLNELNALKYDGNRISLEARNVIIEKLFKEQGKKVTKTSIKNLLKAEGYIDGKGEITGIDITVKNDLKSYRDFKKILGDKFNTEHVENIILWITLYGESRKLIKAKIEAVYGDIYSKEEIAKMSRLVYKDWGRFSRKLLTELVSKKLYNEETGECLNIIGAMRQNNILFMELLADRFDYSQQIIDYNKELQKEVTEITPEILDDLYVSPSVKRSIWQTVRIVEELKKIIGCAPAKIFVETTRSNQDKKKPTDSRKKQLELFYKAVKKDVKDLEKEIGSLNFDKLNERLSSVEPSKLKAKKLYLYYTQLGRCMYSGETIDITQLNTTAYDIDHIYPQSKVKDDSFTNTVLVKREYNAAKTDRYPLGSDIQTPSNRRFWKFLKEKGLITDEKYNRLVRTEEFSDEELTGFIARQLVETSQSVKAVAGILGELNPKTSICYSKAENVSSFRQNFGKIKEGNRKSDNTEQLIKVREINDYHHAKDAYLNVVVGNVYDTKFTRNVFNFIKDKKDGRKYSLNNVFYENVSNSNNVAWELNKTVHQVEKVMNNNNILVTRRTSEQKGGLFDATVYKAKVAAKAKEGVYYPLKTSDPVVNDVTKYGGFTKVKIAYYSIFEYTLVNKKGEEKITRIIPIPIYVSQNIKDDSTLLEFGKTQINIKSGEEVKDFKLKYRKLCIGDLVKINNFFNFIGGKTNDSFVYDGAVQVTLDTESERYIKTLSKYQNWKKENKDGELWESITKEKNTELYNLLVEKMNSGIFIKKKPNKFNELNSEEIRNNFSSISLEEQAKVLLEVLNLLTNKKSIFDLKSINITAARGKISFNLSNLSQFSIIEQSVAGFYEKEITIIGDKENDMENNNC

SEQ ID NO: 982 - protein, 1054 aa, Haemophilus parainfluenzae
MENKNLNYILGLDLGIASVGWAVVEIDEKENPLRLIDVGVRTFERAEVPKTGESLALSRRLARSARRLTQRRVARLKKAKRLLKSENILLSTDERLPHQVWQLRVEGLDHKLERQEWAAVLLHLIKHRGYLSQRKNESKSENKELGALLSGVDNNHKLLQQATYRSPAELAVKKFEVEEGHIRNQQGAYTHTFSRLDLLAEMELLFSRQQHFGNPFASEKLLENLTALLMWQKPALSGEAILKMLGKCTFEDEYKAAKNTYSAERFVWITKLNNLRIQENGLERALNDNERLALMEQPYDKNRLFYSQVRSILKLSDEAIFKGLRYSGEDKKAIETKAVLMEMKAYHQIRKVLEGNNLKAEWAELKANPTLLDEIGTAFSLYKTDEDISAYLAGKLSQPVLNALLENLSFDKFIQLSLKALYKLLPLMQQGLRYDEACREIYGDHYGKKTEENHHFLPQIPADEIRNPVVLRTLTQARKVINGVVRLYGSPARIHIETGREVGKSYKDRRELEKRQEENRKQRENAIKEFKEYFPHFAGEPKAKDILKMRLYKQQNAKCLYSGKPIELHRLLEKGYVEVDHALPFSRTWDDSFNNKVLVLANENQNKGNLTPFEWLDGKHNSERWRAFKALVETSAFPYAKKQRILSQKLDEKGFIERNLNDTRYVARFLCNFIADNMHLTGEGKRKVFASNGQITALLRSRWGLAKSREDNDRHHALDAVVVACSTVAMQQKITRFVRFEAGDVFTGERIDRETGEIIPLHFPTPWQFFKQEVEIRIFSDNPKLELENRLPDRPQANHEFVQPLFVSRMPTRKMTGQGHMETVKSAKRLNEGISVIKMPLTKLKLKDLELMVNREREKDLYDTLKARLEAFNDDPAKAFAEPFIKKGGAIVKSVRVEQIQKSGVLVREGNGVADNASMVRVDVFTKGGKYFLVPIYTWQVAKGILPNKAATQYKDEEDWEVMDNSATFKFSLHPNDLVKLVTKKKTILGYFNGLNRATGNIDIKEHDLDKSKGKQGIFEGVGIKLALSFEKYQVDELGKNIRLCKPSKRQPVR

SEQ ID NO: 983 - protein, 1052 aa, Haemophilus parainfluenzae]
MKNTSLNYVLGLDLGISSVGWAVVEIDEKENPLSLIDVGVRTFERAETQKGESLALARRLARSARRLTQRRVARLKKAKRLLKSENILLSTDECLPHQVWQLRVEGLERKLERQEWAAVLLHLIKHRGYLSQRKNESKSENKELGALLSGVANNHKLLQQTTYRTPAELAVKKFEVEEGHIRNQQGSYTHTFSRLDLLSEMELLFSRQQHFGNPFTSEKLLENLTALLMWQKPALSGDAILKMLGKCTFENEYKAAKHTYSAERFIWITKLNNLRIQENGLERALNDNERLALMKQPYEKAKLTYAQVRSILNLSDEAIFKGLRYSGEDKKTSETKTVLMEMKAYHQIRLALEKNDLKTEWAELKVNSSLLDEIGTAFSLYKTDEDISTCLAGKLSQPVLNALLENLNFDKFIQLSLKALHKILPLMQQGLRYDEACAEIYGDHYGKKTEENHLLLPQIPADEIRNPVVLRTLTQARKVINGVVRLYSSPARIHIETGREVGKSYQDRRELEKRQEENRKQREKAISEIKTLFPNFSGEPKAKDILKMRLYYQQNAKCLYSGKPLELHRLLEQGYVEIDHALPFSRTWDDSFNNKVLVLANENQNKGNLTPFEWLDGKNNSERWKAFKALVETSAFPYTKKQRILSQKLDEKGFIERNLNDTRYVARFLCNFIADNMHLTGEGKRKVFASNGQITALLRGRWGLAKSREDNDRHHALDAVVVACSTVSMQQKITRFVRFEEGNVFTGERIDRETGEIIPLHFPAPWKFFREEVEIRIFSDNPKLELENRLIARPQANHEFVQPLFVSRMPTRKMIGQGHMETIKSAKRLNEGLSVIKMLLTKLRLKDLESMVNREREKELYEALKARLEAFNDEPAKAFAEPFMKKGGAIVKSVRVEQVQKSGVLVRDGNGVADNASMVRVDVFTKGGKYFLVPIYTWQVAKGILPNKAVIQGKNEEDWEVMDDATFRFSLHQNDLVKLVTKKKTIFGYFNGLNRATGNIDIKEHDLEKSKVKDGIHQSIGIKLALSFEKYQVDELGKNIRLCKSSKRQAVR

SEQ ID NO: 984 - protein, 121 aa, Haemophilus pittmaniae
MLNRRYAAKITRFVRFEAGDVFTGERIDRETGEIIPLHFPTPWQFFKQEVEIRIFSDNPKLELENRLPDRPQANHEFVQPLFVSRMPTRKMTGQGHMETVKSAKRLNEGISVIKMPLTKLN

SEQ ID NO: 985 - protein, 203 aa, Haemophilus pittmaniae
MVNREREKDLYDALKARLEAFNDDPAKAFAEPFIKKGGAIVKSVRVEQVQKSGVLVREGNGVADNASMVRVDVFTKDGKYFLVPIYTWQVAKGILPNKAATQYKDEEDWEVMDNSAIFKFSLHPNDLVKLVTKKKTILGYFNGLDRATGNIAIKEHDLEKSKAKGGIHQGVGIKLALSFEKYQIDELGKNIRLCNPSKCQSVR

SEQ ID NO: 986 - protein, 1052 aa, Haemophilus sputorum
MKNTSLNYVLGLDLGISSVGWAVVEIDEKENPLSLIDVGVRTFERAETQKGESLALARRLARSARRLTQRRVARLKKAKRLLKSENILLSTDECLPHQVWQLRVEGLERKLERQEWAAVLLHLIKHRGYLSQRKNESKSENKELGALLSGVANNHKLLQQTTYRTPAELAVKKFEVEEGHIRNQQGSYTHTFSRLDLLSEMELLFSRQQHFGNPFTSEKLLENLTALLMWQKPALSGDAILKMLGKCTFENEYKAAKHTYSAERFIWITKLNNLRIQENGLERALNDNERLALMKQPYEKAKLTYAQVRSILNLSDEAIFKGLRYSGEDKKTSETKTVLMEMKAYHQIRLALEKNDLKTEWAELKVNSSLLDEIGTAFSLYKTDEDISTCLAGKLSQPVLNALLENLNFDKFIQLSLKALHKILPLMQQGLRYDEACAEIYGDHYGKKTEENHLLLPQIPADEIRNPVVLRTLTQARKVINGVVRLYSSPARIHIETGREVGKSYQDRRELEKRQEENRKQREKAISEIKTLFPNFSGEPKAKDILKMRLYYQQNAKCLYSGKPLELHRLLEQGYVEIDHALPFSRTWDDSFNNKVLVLANENQNKGNLTPFEWLDGKNNSERWKAFKALVETSAFPYTKKQRILSQKLDEKGFIERNLNDTRYVARFLCNFIADNMHLTGEGKRKVFASNGQITALLRGRWGLAKSREDNDRHHALDAVVVACSTVSMQQKITRFVRFEEGNVFTGERIDRETGEIIPLHFPAPWKFFREEVEIRIFSDNPKLELENRLIARPQANHEFVQPLFVSRMPTRKMTGQGHMETIKSAKRLNEGLSVIKMLLTKLRLKDLESMVNREREKELYEALKARLEAFNDEPAKAFAEPFMKKGGAIVKSVRVEQVQKSGVLVRDGNGVADNASMVRVDVFTKGGKYFLVPIYTWQVAKGILPNKAVIQGKNEEDWEVMDDATFRFSLHQNDLVKLVTKKKTIFGYFNGLNRATGNIDIKEHDLEKSKVKDGIHQSIGIKLALSFEKYQVDELGKNIRLCKSSKRQAVR

SEQ ID NO: 987 - protein, 1338 aa, Helcococcus kunzii
MQDYYLGLDIGTNSVGWAVTDENYNLLRKKGKDLWGVRLFKEAQPATERRGHRSSRRRTIRKSLRKQLLRELFEEEINAIDKDFFLRLDESKYWLEDKKIEGKYSLFNDENFTDKDYYEKFPTIFHLRKALIESDDKEDIRLYFLAINQMMKRRGHFLIDGKLSNVEDITPFKECIQNLINEELDTEIETEFYDKAIKIVSDYSLKKTEKKNLIKDLVKETDSIEDSKKIINIFNLLISGKSKVNGIFDDEEILEKIKEDNKEDFYLTSEKYEENLEYFSQLLDYRFELISSLKSIYDYIILQEVLKGKKYLSYAQVERYKNHKEDLRKLKQLIKKYDKNGKIYYQIFRDENFKKGYVAYLGYYKKNKKNVPVKKCDYDTFSKNIKSTLDKICDKEDPLYIELIDKIEKGGFLLKQIVSTNSVIPHQVHELELDKILENLEKNYPSFKEISDGVSKIDKIKMIFNFRIPYYVGPLNDYHKDKVNSNTWIVKNEGFENENIRPWNFSKIVDEHACEEEFIKRMINECSYIPGEKVLPKSSLLYSEYMVLNELNNLRVNGDKLNPKIKKEIVENIYKKERKVTLKKIRNFLIINNYVDSKVEFSGLSDGIKANMSSYIDFAEILDDNFDNNMVEDLIEQITIHVGNVKLLTEKISNKYPNLEKKQINKIVNLKFKDWARFSRKLLVGIEGTEKETGEINTIIGFLRETNENFMELMSNRYTFSEEISEIKKKYIPNKLSKQIVDDLYVSPAVKKMIWQVLNINDELIKVLGKQPKKIFIEMARGKEEKPEVKDSRKNKLIELYKNLGKEGKEWLNRIEDKTEADFRNRALYLYYTQMGRCMYTGEIIDIERLYDKELYDLDHIIPRKMKKDDSIHKNLVLVTRNSNQYEKKDNYPVPEVIKSRENVRHLWYALKKKGLITEEKYNRLTRINPLSDKELSEFIERQLVETRQTTKVVKDLFENYYTDSKIVTVKAGLVSELRRDFEVLKCREINDLNHAHDAFLNIIVGDVWSKKFTSNPYNFVKKNREKYTLNNIFTKNQKDLRGNEIWNCAEGKKRIIKTLNKPSVLFSVENFEQTGQLFDQNIIGKQDYKEKTSYVPIKGDERLQDISKYGGYRGISGAYFFIVEHTEKNKRVKTIESLPIYMKSYVEENGLLDFCTNEMKLVDPKIIVKKLNYKSEIIVDGFKYLISGKTENRLSLETNEYLYWNHTQTTDIKKILNINEKIELEKYNGDIESERENIIKYIQIILEKFKLKPFIKRRNLPNIEINFADYETEKLLQLLVNLIPLTTKYVSPVDLTVISGSKYAGKVLIPKKISNLNEVIFISKSITGIYESRRRII

SEQ ID NO: 988 - protein, 1023 aa, Helicobacter cinaedi
MKIYSFDIGVASIGWAFIENEVLQDCGIRIFTKAENPKNGASLALPRREARGVRKRLARRRGRLNTIKQLLCKEFGLQLEDYLSNDGELPKAYTASKANPLKSPYELRTLALSQKLDSKDLVRVILHIAKHRGYGNKHAKDSKDTESGKVKKAIEFNRKTLAEKGYRSVGEYLYREFFQQSRISQNNGATEFINVRNKAGNYEHCVAQDMLKEELESILNAQRQFGFSLKQDFENKLLTKIFEQRPLKSFADKVGNCCFIAGEKRTPKDSLSAIEFIALSRTINTLINLSKESGEIYNRAIILQIVESTLKKGEISYKELREIIRLDERLRFKDPRLDYSREIKEAEKVKFLEFKQLKGFKKALGESFTTLARSQLDEIAEHIALIKDRVKLNEKLESYALTKEQREALSNLSFSAHINLSLQALKQILPFMRGDNGEQCLDYDESVEKAGLKALSKDTLKGQMLPPLNEFEPYLSNPVVARALAEYRKVLNALLKQYGSPHKIHIEYAREAKLSSTERQKYEKEQKDNYAANQAAHKKCQELGLEPSSTNLLKLKLWQEQGGLCLYSGAKITISYLQDPTALQVDHIYPYSRSFDDSYMNKCLVLTKANQEKGNRTPFEAFGTDSAKWGVITTLAQKLPHKKRRRILNTAFNDKEAGFKLRNLNDTSYIARLVADYTETYLEFLPLVESENTTLGKGQKGSKKHIAIVNGALTSTMRYYLGFASKDRDNHLHHALDAVIIGFMNDSVIKAFSDFKKTQETSKAAYYAHTLSKQEYKKQRAFIQLPSGENFRASVLEKVESVFVSKPPRKRVRGALHEATFYSPNDPKLLKNYGGTKGVERALALGKMRKVGAKIVSNGAMVRVDIFRHKSSGKFYGVPVYTMDFALGILPNKAVVVGKDKNGVIKDWLEMDSSYEFIFSLYKDDLLLVQKKEMAEPELCYFMSFNSSIAQISVAKHDNNFSTLTKNQKLLFSNATQEDVSGKSIGIQNLQVFEKWQVSVLGEVKRTQSYPRENISLASKAKK

SEQ ID NO: 989 - protein, 1023 aa, Helicobacter cinaedi
MKIYSFDIGVASIGWAFIENEVLQDCGIRIFTKAENPKNGASLALPRREARGVRKRLARRRGRLNTIKQLLCKEFGLQLEDYLSNDGELPKAYTASKANPLKSPYELRTLALSQKLDSKDLVRVILHIAKHRGYGNKHAKDSKDTESGKVKKAIEFNRKTLAEKGYRSVGEYLYREFFQQSRISQNNGATEFINVRNKAGNYEHCVAQDMLKEELESILNAQRQFGFSLKQDFESKLLTKIFEQRPLKSFADKVGNCCFIAGEKRAPKDSPSAIEFIALSRTINTLINLSKESGEIYNRAIILQIVESTLKKGEISYKELREIIRLDERLRFKDPRLDYSREIKEAEKVKFLEFKQLKGFKKALGESFTTLAISQLDEIAEHIALIKDRVKLNEKLESYALTKEQREALSNLSFSAHINLSLQALKQILPFMRGDNGEQCLDYDESVEKAGLKALSKDTLKGQMLPPLNEFEPYLSNPVVARALAEYRKVLNVLLKQYGSPHKIHIEYAREAKLSSTERQKYEKEQKDNYAANQAAHKKCQELGLEPSSTNLLKLKLWQEQGGLCLYSGAKITISYLQDPTALQVDHIYPYSRSFDDSYMNKCLVLTKANQEKGNRTPFEAFGTDSAKWGVITTLAQKLPHKKRRRILNTAFNDKEAGFKLRNLNDTSYIARLVADYTETYLEFLPLVESENTTLSKGQKGSKKHIAIVNGVLTSTMRYYLGFASKDRDNHLHHALDAVIIGFMNDSVIKAFSDFKKTQETSKAAYYAHTLSKQEYKKQRAFIQLPSGENFRVSVLEKVESVFVSKPPRKRVRGALHEATFYSPNDPKLLKNYGGTKGVERALALGKMRKVGAKIVSNGAMVRVDIFRHKSSGKFYGVPVYTMDFALGILPNKAVVVGKDQNGVIKDWLEMDSSYEFIFSLYKDDVILVQKKEMQRPELCYFVSFDTSGASIKVAKHDNNFSTLTENQKLLFSNATKEEVVGKSIGIQNLKVFEKWQVSVLGEVKRTQSYPRENISLASKAKK

SEQ ID NO: 990 - protein, 344 aa, Helicobacter pullorum
MKILGFDIGIASIGWAFVENGELKDCGVRIFTKAENPKTGDSLAMPRREARSVRRRLARRKGRLETLKRLLAKEWDLCYEDYIAADGELPKAFMGKNLTNPYVLRYEALQRLLSKEELVRVVLHIAKHRGYGNKNAKITKSEESKREQGKILSALATNASVIARYRTVGEYFYKEFCEVIKNPQGLNTNENCTQPKVRVLKPIRNKGGEYTNCILQEDLQRELRCIFEHQKGFGFSITQEFQDKILKIAFYQRSLKDFSHLVGKCTFYPDEPRAPKFSLSAIEFITKAKAINLLASIAKESGEVWDKEQWRERLDSVFSAVCERGINTIPSSSHFLNIFDILYL

SEQ ID NO: 991 - protein, 1688 aa, Ignavibacterium album
MEFKKVLGLDIGTNSIGCALLSLPKSIQDYGKGGRLEWLTSRVIPLDADYMKAFIDGKNGLPQVITPAGKRRQKRGSRRLKHRYKLRRSRLIRVFKTLNWLPEDFPLDNPKRIKETISTEGKFSFRISDYVPISDESYREFYREFGYPENEIEQVIEEINFRRKTKGKNKNPMIKLLPEDWVVYYLRKKALIKPTTKEELIRIIYLFNQRRGFKSSRKDLTETAILDYDEFAKRLAEKEKYSAENYETKFVSITKVKEVVELKTDGRKGKKRFKVILEDSRIEPYEIERKEKPDWEGKEYTFLVTQKLEKGKFKQNKPDLPKEEDWALCTTALDNRMGSKHPGEFFFDELLKAFKEKRGYKIRQYPVNRWRYKKELEFIWTKQCQLNPELNNLNINKEILRKLATVLYPSQSKFFGPKIKEFENSDVLHIISEDIIYYQRDLKSQKSLISECRYEKRKGIDGEIYGLKCIPKSSPLYQEFRIWQDIHNIKVIRKESEVNGKKKINIDETQLYINENIKEKLFELFNSKDSLSEKDILELISLNIINSGIKISKKEEETTHRINLFANRKELKGNETKSRYRKVFKKLGFDGEYILNHPSKLNRLWHSDYSNDYADKEKTEKSILSSLGWKNRNGKWEKSKNYDVFNLPLEVAKAIANLPPLKKEYGSYSALAIRKMLVVMRDGKYWQHPDQIAKDQENTSLMLFDKNLIQLTNNQRKVLNKYLLTLAEVQKRSTLIKQKLNEIEHNPYKLELVSDQDLEKQVLKSFLEKKNESDYLKGLKTYQAGYLIYGKHSEKDVPIVNSPDELGEYIRKKLPNNSLRNPIVEQVIRETIFIVRDVWKSFGIIDEIHIELGRELKNNSEERKKTSESQEKNFQEKERARKLLKELLNSSNFEHYDENGNKIFSSFTVNPNPDSPLDIEKFRIWKNQSGLTDEELNKKLKDEKIPTEIEVKKYILWLTQKCRSPYTGKIIPLSKLFDSNVYEIEHIIPRSKMKNDSTNNLVICELGVNKAKGDRLAANFISESNGKCKFGEVEYTLLKYGDYLQYCKDTFKYQKAKYKNLLATEPPEDFIERQINDTRYIGRKLAELLTPVVKDSKNIIFTIGSITSELKITWGLNGVWKDILRPRFKRLESIINKKLIFQDEDDPNKYHFDLSINPQLDKEGLKRLDHRHHALDATIIAATTREHVRYLNSLNAADNDEEKREYFLSLCNHKIRDFKLPWENFTSEVKSKLLSCVVSYKESKPILSDPFNKYLKWEYKNGKWQKVFAIQIKNDRWKAVRRSMFKEPIGTVWIKKIKEVSLKEAIKIQAIWEEVKNDPVRKKKEKYIYDDYAQKVIAKIVQELGLSSSMRKQDDEKLNKFINEAKVSAGVNKNLNTTNKTIYNLEGRFYEKIKVAEYVLYKAKRMPLNKKEYIEKLSLQKMFNDLPNFILEKSILDNYPEILKELESDNKYIIEPHKKNNPVNRLLLEHILEYHNNPKEAFSTEGLEKLNKKAINKIGKPIKYITRLDGDINEEEIFRGAVFETDKGSNVYFVMYENNQTKDREFLKPNPSISVLKAIEHKNKIDFFAPNRLGFSRIILSPGDLVYVPTNDQYVLIKDNSSNETIINWDDNEFISNRIYQVKKFTGNSCYFLKNDIASLILSYSASNGVGEFGSQNISEYSVDDPPIRIKDVCIKIRVDRLGNVRPL

SEQ ID NO: 992 - protein, 1354 aa, Indibacter alkaliphilus
MKKILGLDLGTTSIGWAFIKEPEKDVVGSEIVDMGVRIVPLSSDEENDFAKGNTISINADRTLKRGARRNLQRFKQRRNALLETFKEKNLIPSNFQYAEDGPSSTFSTLKLRDKAAKEKIELDDFVKVLLQINKKRGYKSSRKAMSEEDEGTAIDSMGIAKELYENDLTPGQWVYEALKNGRKNVPDFYRSDLQEEFKKIVNYQSEFYPDILNTSFVEDWMGKASTPTKQYFNKRGVQLAENKGKREERRLQEYKWRAEAVNFKIDLSEIALILSQINSQISNSSGYLGAISDRSKELYFKNLTVGQYLYQQVKKNPHTRLKGQVFYRQDYLDEFEKIWSVQSSFYPQLNDELKQEVRDVTIFFQRRLKSQKHLISNCEFEEHHKVVPKSHPIFQEFRIWQNLNNLTLIKKDNLNEKCELALEDKTALANELAFKKELSVKDALKVLGLKPSDWEFNFTKIEGNRTNHAFFEAFAKIIELEDGEPIDLGNLKADDILDQFSEAFLRIGIDTELLQVNSDIEGAEYEKQSYIQFWHLLYSSEDDQKLKQNLIRKFGFKPEHAKILASISLQDDHASLSSRAIKKILPHLQSGLIYDKACTYAGYNHSSSFTKDENEKRELRAELELLKKNSLRNPVVEKILNQMINVVNAILKDPNLGRPDEIRVEMARELKANAEQRKNMTSNIASATRDHEKYREILKKEFGLKRVTKNDLLRYKLWLETDGISLYTGKPIEASKLFSKEYDIEHIIPKARLFDDSFSNKTICERQLNIDKANVTAFSFLQNKLSADEFEQYQSRVKSLYGKLSKAKIQKLLMANDKIPEDFIARQLQETRYISKKAKEILFEITMRVSVTTGTITDKLREDWGLVEIMKELNWEKYDKLGLTYTIEGKHGERLNKIKDWNKRNDHRHHAMDALTVALTKPAYIQYLNNLNAKAIGNKKGTEIFAIEQKYLKRENGKLCFIPPIENIRAEAKKHLSKILVSYKAKNKVVTINKNKTKKKAGFNEQTALTPRGQLHKETVYGKSFHYSTKFEKIGASFDAQKINTVAKKEEREALLKRLAENGNDPKKAFTGKNSLNKMPIYLDLGKNIKLSEKVKTVVLEQNYTIRKNIDPDLKVDKVIDVGIKRILESRLEEFGGNAKLAFSNLEENPIWLNKEKGIPIKRVKISGVSNVESLHVKKDHFGEKILDEEGNEIPVDFVSTGNNHHVAIYEDEDGNLQDEVVNFYEAVIRRNQGESIIKYRHEEGWNFLYSIKQNEFFVFPSQDFNPNDFDLLDPKNYDLISPNLYRAQKFSKVMYGNSAVRDYVFRHHLETVLNDVKELKDVAYKQLKSLQYLNGIKKVRLNHLGQIIQVGEY

SEQ ID NO: 993 - protein, 1397 aa, Joostella marina
MKKVLGLDLGTNSIGWALVNEATKEEKKEGKSSEIIKLGVRVNPLTVDEKTNFEKGRPLSTNADRTLKRSARRNLQRYKLRRRNLIEILIKNGFITKDTPLTETGKDTTHQTLKLRAKSAKEKVDLKDFAKILLTINKKRGYKSSRKVNSDEDGLAIDGMAVAKHLYEQNLTPGQYVLNLLQKNKKYVPDFYRSDLQEEFKNIWNNQKTYYFDILTDTLFEELKDKNKSQTWAICKKPFDIAGIKQIGKASDKRLERYKWRTEGLTQKLNLEYLAIALQEINNDINKSSGYLGAISDRSKELFFNKETVGENLYRQLVKTPHTSLRNQVFYRQDYLDEFETIWETQAKFYPQLTHTLKEEIRDVIIFYQRKLKSQKSLISFCQFESWEQTYIEKETGKSKTRTVGRKVIPKSSPLFQEFKIWQNLNSLEFRNSDEGEIIEFIKLDEDIRQTVFEELNLRGNLKPNDVLKILGNYISLGKVSQWKCNFEEIEGNRTNAALYNVYQIIAENEGYGFDWAKKTASEINKELKNIFPQLGIDASILDFDFTQANFDKQTSYQLWHLLYSAEEDFKISEEDKVLYGNSSVSLKKKLHQKYGFKPEYTKLLTNISLQPDYGNLSAKAICNILPYLKENNVYSEACDLTGYNHSNFLTAEEQAKRPLKPILELLKKNSLRNPVVEKILNQMVNVVNQVIETYGKPDEIRIELTRELKKSAKERANMTKSIADATRRNDDYRKTIIKEFGIPNPTKSDVVRYRLWQELASRGYKDIFTDTEIKPQELFSNKIDIEHIIPKALLFDDSFSNKTLAFKKDNLKKANRTAYDFIANDYAPNLENYIERVESLHKDRKITRAKRNKLLMLQSKLPDGFIERDLRNSQYITKEAKKMLYEVCRTVVSTSGSITDKLREDWDLINVMKELNFPKYKALGLTEKIERYDIGAEKMKEVEIIEDWNKRNDHRHHAIDALTVAFSTHSHIQYLNHLNARRDEGHKKHAAIIAIESTITEKEGNKKRRFIAPLPNFRLQAKEHIESILVSFKNKNKVVTNNINKTKRIKKDKFNTKVQLTPRGQLHKETIYGKIKQPLEKHIKLNKSFTLEQAKLIIDKRQREKVLNHLEKYAHNSDIAFNSKTLKKNPLLISDEPLKEVLCFEEVFTIRKDISYDNFKNEKQLDKVIDEKVKQALKERINQYNGDFREAFSDIERNPIWLNKAKGICVKRATIKGVSNAEPLHTAKNHLGEEVLTENKEQIPVDYVSTGNNHHVAIYEDEDGNLQEKVVSFYEAVIRVNEGLPIIDKEYNKSLGWTFKFTMKQNEMFVFPSEDFNPTEIDLLDQKNASLISPNLFRVQKFTIKDYFFRHHLETTVENNNTLKNTTWRREGLSGIYGIIKIRLNHLGEIVQVGEY

SEQ ID NO: 994 - protein, 1060 aa, Kingella kingae
MAAKSLNYILGLDLGIASCGWAVVEMDEQENPLRLIDVGVRTFEEAENPKDGSSLAETRRLARAQRRLISRRANRMNKLCRLLKQENVLQANDYDEKGLIIGLPNQAWELRAQGLDRKLEPKEWAAVLIHLVKHRGYLSQRKNESQTADKELGALLSGMNHNHQLLQSQSNQYRTPAELAIKQFATQDGHIRNQRGAYTHTFNRLDLQNELNQLFDAQTRLGNPHVSGSLKTAINDLLMNQKAALSGDAILEMLGRCTFEPSEYKAAKNTYSAERFVWLGKLTNLRIQDNGLESALSREQRELLLNEPYNKTKLTYQQVRKLLRLPETAFFKGLRYGKDNAESATFMEMKSYHAIRKSLENKSLKSEWEKLKTQPKLLDLIGTAFSIYKTDDEIAGCLKNQLPENVIIALQGQLNFSNFMELSLKALEKLLPLMEQGLRYDEACTQIYGNRHEKIADKTEKFLPNIPADKLRNPVVLRTLTQARKVINAIIRRYGSPARVHIETGREVGKSFSDRDKLKKQQEENQEQRRRAIDEWKQFFPNAAHEPKAVDILKLRLYQLQQGKCLYSGLPIDVRRLPEKGYVEIDHALPFSRTWDDSFNNKILVLASENQNKGNQTPYEYLRGADNSESWRLFVENVQNCQFSPNKKQKIMAKQLDEKGFLERNLNDTRYVSRFLCQFISEHLHLTGKGKKRVFASNGQITALLRGRWGLSKNREENDRHHAVDAVVVACSTVAMQQKITQFVRYQKGNVFTGERIDKETGEVISIHFPTPWEHFREEVMIRVFDDNPLRTLPEKLPNRPEALHEYVMPLFVSRMPTRKMTGQGHKETIKSAKRLDEKISVLRVPLTQLKLNDLENMVNREREPALYEALKARLEQFKNDPAKAFAEPFFKQGGQQVKAVRVEIVQKSGMLLRKINGVADNGSMVRVDVFEKSGKFYLVPIYAWQVAEGILPNYAVVAHKDESDWILMDESYHFKFALYKNDLLEVQTKKGGIMGYFASLDRATGAITIREHDRDKKKCKDGEHRSIGVKMASSFKKLQVDELGKNIHETRSRKRPNIG

SEQ ID NO: 995 - protein, 1314 aa, Lactobacillus animalis
MLKKDYSIGLDIGTNSVGHAVVTDDYKVPTKKMKVFGDTSKKTIKKNMLGVLLFNEGQTAADTRLKRGTRRRYTRRKNRLRYLQEIFAPELAKVDPNFLYRLEESSLVAEDKKYDVYPIFGKREEELLYHDTYKTIYHLRSALANNDQPADLRLVYLALAHIIKYRGNFLLEGEIDLRTTDINKVFAEFSETLNENSDENLGKLDVADIFKNNTFSKTKKSEELLKLSGAKKNQLAHQLFKMMVGNMGSFKKVLGTDEEHKLSFGKDTYEDDLNDLLAEAGDQYLDIFVAAKKVYDAAILASILDVKDTQTKTVFSQAMIERYEEHQKDLIELKRVFKKYLPEKCHDFFSEPKISGYAGYIDGKVSEEDFYKYTKKTLKGIPETEEILQKIDANNYLRKQRTFDNGAIPHQVHLKELVAIVENQGKYYPFLRENKDKFEKILNFRIPYYVGPLARGNSKFAWLTRAGEGKITPYNFDEMIDKETSAEDFIKHMTINDLYLPTEPVLPKHSLLYERYTIFNELAGVRYVTENGEAKYFDAQTKRSIFELFKLDRKVSEKMVIKHLKVVMPAIRIQALKGLDNGKFNASYGTYKDLVDMGVAPELLNDEVNSEKWEDIIKTLTIFEGRKLIKRRLENYRDFLGEDILRKLSRKKYTGWGRLSAKLLDGIYDKKTHKTILDCLMTEDYSQNFMQLINDDNYSFKETIKNAQVIEKEETLAKTVQELPGSPAIKKGILQSLEIVDEIIKVMGYKPKSIVVEMARETQKTHGTRKREDRVQQIVENLKDANELPEKLPSNAELSDERKYLYCLQNGRDMYTGAPLDYDHLQFYDVDHIIPQSFLKDDSIENKVLTIKKENVRKTNGLPSEAVIQKMGSFWKKLLDAGAMTNKKYDNLRRNLHGGLNEKLKERFIERQLVETRQITKYVAQLLDQRLNYDGNGVELDEKIAIVTLKAQLASQFRSEFKLRKVRALNNLHHAHDAYLNAIVANLIMAKYPELEPEFVYGKYRKAKFKGLGKATAKNTLYANVLYFLKENEVYPFWDKARDLPTIKRYLYRAQVNKVRKAERQIGGFSDEMLVPKSDSGKLLPRKEGLDPVKYGGYAKAVESYAVLITADEVKKGKTKKVKTLVNIPIIDSKKYEADPTAYLASRGYTNVTNSFILPKYSLLEDPEGRRRYLASFKEFQKANELILPQHLVELLYWVNAKDGEQKLEDHKAEFKELFDKIMEFADKYVVAPKNSEKIRRLYEENQDATPMELGKNFVELLRYTADGAASDFKFFGENIPRKRYNSAGSLLNGTLIYQSKTGLYETRIDLGKL

SEQ ID NO: 996 - protein, 1371 aa, Lactobacillus buchneri
MKVNNYHIGLDIGTSSIGWVAIGKDGKPLRVKGKTAIGARLFQEGNPAADRRMFRTTRRRLSRRKWRLKLLEEIFDPYITPVDSTFFARLKQSNLSPKDSRKEFKGSMLFPDLTDMQYHKNYPTIYHLRHALMTQDKKFDIRMVYLAIHHIVKYRGNFLNSTPVDSFKASKVDFVDQFKKLNELYAAINPEESFKINLANSEDIGHQFLDPSIRKFDKKKQIPKIVPVMMNDKVTDRLNGKIASEIIHAILGYKAKLDVVLQCTPVDSKPWALKFDDEDIDAKLEKILPEMDENQQSIVAILQNLYSQVTLNQIVPNGMSLSESMIEKYNDHHDHLKLYKKLIDQLADPKKKAVLKKAYSQYVGDDGKVIEQAEFWSSVKKNLDDSELSKQIMDLIDAEKFMPKQRTSQNGVIPHQLHQRELDEIIEHQSKYYPWLVEINPNKHDLHLAKYKIEQLVAFRVPYYVGPMITPKDQAESAETVFSWMERKGTETGQITPWNFDEKVDRKASANRFIKRMTTKDTYLIGEDVLPDESLLYEKFKVLNELNMVRVNGKLLKVADKQAIFQDLFENYKHVSVKKLQNYIKAKTGLPSDPEISGLSDPEHFNNSLGTYNDFKKLFGSKVDEPDLQDDFEKIVEWSTVFEDKKILREKLNEITWLSDQQKDVLESSRYQGWGRLSKKLLTGIVNDQGERIIDKLWNTNKNFMQIQSDDDFAKRIHEANADQMQAVDVEDVLADAYTSPQNKKAIRQVVKVVDDIQKAMGGVAPKYISIEFTRSEDRNPRRTISRQRQLENTLKDTAKSLAKSINPELLSELDNAAKSKKGLTDRLYLYFTQLGKDIYTGEPINIDELNKYDIDHILPQAFIKDNSLDNRVLVLTAVNNGKSDNVPLRMFGAKMGHFWKQLAEAGLISKRKLKNLQTDPDTISKYAMHGFIRRQLVETSQVIKLVANILGDKYRNDDTKIIEITARMNHQMRDEFGFIKNREINDYHHAFDAYLTAFLGRYLYHRYIKLRPYFVYGDFKKFREDKVTMRNFNFLHDLTDDTQEKIADAETGEVIWDRENSIQQLKDVYHYKFMLISHEVYTLRGAMFNQTVYPASDAGKRKLIPVKADRPVNVYGGYSGSADAYMAIVRIHNKKGDKYRVVGVPMRALDRLDAAKNVSDADFDRALKDVLAPQLTKTKKSRKTGEITQVIEDFEIVLGKVMYRQLMIDGDKKFMLGSSTYQYNAKQLVLSDQSVKTLASKGRLDPLQESMDYNNVYTEILDKVNQYFSLYDMNKFRHKLNLGFSKFISFPNHNVLDGNTKVSSGKREILQEILNGLHANPTFGNLKDVGITTPFGQLQQPNGILLSDETKIRYQSPTGLFERTVSLKDL

SEQ ID NO: 997 - protein, 315 aa, Lactobacillus casei
MFKDYLKQLEDDGTAKAIRQLYDRYIDGDDAKPFVREDFVKALTKEVTAHPNAKSPELLERLAQPDFMLKQRNKANGAIPVQMQQRELDQIIKNQSVYYDWLAAPNPVEKHRKSMPYQLDELLNFRIPYYVGPLVTAKEQKAARGGVFAWMVRKDPDGNITPYNFDEKVDREASANTFIQRMKTTDTYLIGEDVLPKQSLLYQSYEVLNELNNVRVNDNKLSFDQKQQVLGELFERHNTVTIKQFVDNLLAHGDYDRIPEVRGLADEKRFLSSLSTYNQLKGILHEAIDDSDKQTDMVDCKINPNAVRTKKISFL

SEQ ID NO: 998 - protein, 236 aa, Lactobacillus casei
MFKDYLKQLEDDGTAKAIRQLYDRYIDGDDAKPFVREDFVKALTKEVTAHPNAKSPELLERLAQPDFMLKQRNKANGAIPVQMQQRELDQIIKNQSVYYDWLAAPNPVEKHRKSMPYQLDELLNFRIPYYVGPLVTAKEQKAARGGVFAWMVRKDPDGNITPYNFDEKVDREASANTFIQRMKTTDTYLIGEDVLPKQSLLYQSYEVLNELNNVRVNDNKLSSSIFKSSATMITNS

SEQ ID NO: 999 - protein, 1389 aa, Lactobacillus casei
MIIRTYELKTITTIAILKMFQLLTGGLSMTKLGKPYGIGVDIGSNSIGFAAVDENSHLIRLKGKTVIGARLFEEGKAAADRRASRTTRRRLSRNRWRLSFLRDFFESHITPTGPNFFMRQKYSEISPKDKARYKYEKRLFNDRTDAEFYQQYPTMYHLRNRLLTDPSKADVREIYFAIHHILKSRGHFLTSGYAKDFNTNKVALNEIFPALQDAYAQVYPDLDITFDENKVNEFKTVLLNEKATPSDTQRALVNLLLAEDGDKDILKQQKQVLTEFAKAVVGLKTKLNVALGTEVDSSEATVWNFSLGQLDDKWAGIESAMTDEGTEILDQIRDLYRARLLNGIVPAGKTLSQAKVDDYAQHHEDLELFKDYLKQLEDDGTAKAIRQLYDRYIDGDDAKPFVREDFVKALTKEVTAHPNAKSPELLERLAQPDFMLKQRNKANGAIPVQMQQRELDQIIKNQSVYYDWLAAPNPVEKHRKSMPYQLDELLNFRIPYYVGPLVTAKEQKAAQGGVFAWMVRKDPDGNITPYNFDEKVDREASANTFIQRMKTTDTYLIGEDVLPKQSLLYQRYEVLNELNNVRVNNEKLSIEQKQQVIRELFERHNSVTIKQFAENLRAHGDYAHIPEIRGLADEKRFLSSLSTYRQLKSLLPDAIDDPAKQADIENIIAWSTVFEDAAIFKTKLKEINWLDSQTITKLSNIRYRGWGQFSHKFLNGLTLGNGHTIIQELFLSNNNLMQILTDETLQKKMTELNADKLKAANINDAIDDAYTSPSNKKALRQVLRVIEDIKRAADGQDPSWLYVETADGGGTPGKRTRARQHQLQEIYANAAHELIDSAVRGELEDKIADKADFNDRLVLYFMQGGRDIYTGTPLNIDQLSSYDIDHILPQSLIKDNSLDNRVLVHAIINREKNATFASTIYAQKMNATWRQWHEAGLISGRKLRNLQMRPDQIDKYASGFVARQLVETRQIIKLTEQIVAAQYPETKIIAVKAGLSHQLREELEFPKNRDVNHYHHAFDAFLAARIGTYLLKRFPNLQAFFTYGKFKKADVKKLRGFNFIRDITHAEDKIVVKDTGEVIWDKKRDVDELDRIYNFKRMLITHEVHFEKADLFKQTVYGAKDSKEAGGKKQLISKKKGYPVDIYGGYTQETGSYLSVVRLTKKAMYAVVKVSTRDAAKLAVAKSISEQKENETLNDIIDEKLSKISKNGKITHELFEVVLPRVGQKTLFKNSKYNLFLVNSDTYMHNYQELWMPREYQKMWKDISLSKYGDAQTEDQLDQIFGFIVSQVNSYFNLYDINQFRKKLNDAADKFATLPMRDTDDMQGKIATIGQLLIGLQANAARSDLRNLDIKTPLGLLQIPNGISLDSDTSVVYQSPTGLLEREVHLSDL

SEQ ID NO: 1000 - protein, 412 aa, Lactobacillus casei
MIKDNSLDNRVLVHPLVNREKDTIFASTRFAKQTNGMWRQWHAAGLISSRKLRNLQMRPDEIDKYASGFVARQLVETRQIIKLTEQIVADQYPDTKIIAVKAGLSSQLRKELDFPKNREVNHYHHAFDAFLAARIGTYLLKRYPNLEPFFTYGKFKKTEVKKLKSFNFIRDMTHAKDKIVAKETGEIVWDNASDINELDRIYNFKRMLITHEVRFETASLFKQTLYAAKNPKNRGGSRQLIPKKKGYLVDIYGGYTQETGSYLSVVRLTKKAMYAVVKVSTRDAAKLAVAKSISEQKENETLKKIIDGKLSKTSKKGKTTHQLFEIVLPRVGQKTLFKNSKYNQFLVNSDTYMHNYQELWMPREYQRMWKDILLSNHGDAQIEGQLDQIFKFIVSQVNSYFNLYDINQFRKK

SEQ ID NO: 1001 - protein, 234 aa, Lactobacillus casei
MKVTKKTETIFKVVKIATSQVAALNKARSRSTAEELSVLTELLKPKFSKVGKNGKITDTPFEVVLPRVPREQLFYNAKYGFFMVNSDTMFHNFQEIWVSRSDQKILQQIRKAKIDYPNVDQDLDNLFHNLADQIVKYFDLYSIAGFKEKISQSQNTFNDLAVDDTDQSVGKITVINELLKGAQANGMTGSLKVLKISTPFGFTQDKSGVLTKDSSIIYQSPTGLFERSVRLTDL

SEQ ID NO: 1002 - protein, 566 aa, Lactobacillus casei
MQILTDEVLKQKIAELNAHELKASGIYAAIDDAYTSPSNKKALRQVLSVIDDITNAAGQAPNWLYIETADGDGVPGKRTNSRQRKIQEIYVNAAQELITSSVRGELEDKIASRADFTDRLVLYFMQGGRDIYTGEPLNIDNLSSYDIDHILPQSLIKDNSLDNRVLVHPLVNREKDTIFASTRFAKQMNGMWRQWHAAGLISSRKLRNLQMRPDEIDKYASGFVARQLVETRQIIKLTEQIVADQYPDAKIIAVKAGLSSQLRKELDFPKNREVNHYHHAFDAFLAARIGTYLLKRYPNLEPFFTYGKFKKTEVKKLKSFNFIRDMTHAKDKIVAKETGEIVWDNASDINELDRIYNFKRMLITHEVRFETASLFKQTLYAAKNSKNRGGSRQLIPKKKGYLVDIYGGYTQETGSYLSVVRLTKKAMYAVVKVSTRDAAKLAVAKSISEQKENETLKKIIDGKLSKTSKKGKTTHQLFEIVLPRVGQKTLFKNSKYNQFLVNSDTYMHNYQELWMPREYQRMWKDILLSNHGDAQLEGQLDQIFKFIVSQVNSYFNLYDINQFRKK

SEQ ID NO: 1003 - protein, 1363 aa, Lactobacillus casei
MTKLGKPYGIGVDIGSNSIGFAAVDENSHLIRLKGKTVIGARLFEEGKAAADRRASRTTRRRLSRNRWRLSFLRDFFESHITPTDPNFFMRQKYSEISPKDKARYKYEKRLFNDRTDAEFYQQYPTMYHLRNRLLTDPSKADVREIYFAIHHILKSRGHFLTSGYAKDFNTNKVALNEIFPALQDAYAQVYPDLDITFDENKVNEFKTVLLDEKATPSDTQRALVNLLLAEDGDKDILKQQKQVLTEFAKAVVGLKMKLNVALGTEVDSSEATAWNFSLGQLDDKWAGIESAMTDEGTEILDQIRDLYRARLLNGIVPAGKTLSQAKVDDYEQHHEDLELFKDYLKQLEDDGMAKVIRQLYDRYIDGDDAKPFVREDFVKALTKEVTAHPNAKSPELLERLVQPDFMLKQRNKANGAIPVQMQQRELDQIIKNQSVYYDWLAAPNPVEKHRQSMPYQLDELLNFRIPYYVGPLVTAKEQKAAQGGVFAWMVRKDPDGNITPYNFDEKVDREASANTFIQRMKTTDTYLIGEDVLPKQSLLYQSYEVLNELNNVRVNDNKLSFDQKQQVLGELFERHNTVTIKQFVDNLLAHGDYDRIPEVRGLADEKRFLSSLSTYNQLKGILHEAIDDSDKQTDIEKIIAWSTIFEDKAIFKTKLNEISWLTAGMINSLANIRYRGWGQFSHKLLNELTLSTGRTVFEELLISSHNLMQILTDEVLKQKIAELNAHELKASGIYAAIDDAYTSPSNKKALRQVLSVIDDITNAAGQAPNWLYIETADGDGVPGKRTNSRQRKIQEIYANAAQELITGSVRGELEDKIASRADFTDRLVLYFMQGGRDIYTGEPLNIDNLSSYDIDHILPQSLIKDNSLDNRVLVHPLVNREKDTIFASTRFAKQMNGMWRQWHAAGLISSRKLRNLQMRPDEIDKYASGFVARQLVETRQIIKLTEQIVADQYPDAKIIAVKAGLSSQLRKELDFPKNREVNHYHHAFDAFLAARIGTYLLKRYPNLEPFFTYGKFKKTEVKKLKSLKSFNFIRDMTHAKDKIVAKETGEIVWDNASDINELDRIYNFKRMLITHEVRFETASLFKQTLYAAKNSKNRGGSRQLIPKKKGYLVDIYGGYTQETGSYLSVVRLTKKAMYAVVKVSTRDAAKLAVAKSISEQKENETLKKIIDGKLSKTSKKGKTTHQLFEIVLPRVGQKTLFKNSKYNQFLVNSDTYMHNYQELWMPREYQRMWKDILLSNHGDAQLEGQLDQIFKFIVSQVNSYFNLYDINQFRKKIADATDKFAKLPTHDTDNARGKIATIGQLLIGLQANAMRSDLRNLDIKTPFGLLQIGTGITLDLDTSIIYQSPTGLFEREVPLTDL

SEQ ID NO: 1004 - protein, 1360 aa, Lactobacillus casei
MTKLGKPYGIGVDIGSNSIGFAAVDENSHLIRLKGKTVIGARLFEEGKAAADRRASRTTRRRLSRNRWRLSFLRDFFESHITPTDPNFFMRQKYSEISPKDKARYKYEKRLFNDRTDAEFYQQYPTMYHLRTRLLTDPSKADVREIYFAIHHILKSRGHFLTPGYAKDFNTNKVALNEIFPALQDAYAQVYPDLDITFDENKVNEFKTVLLNEKATPSDTQRALVNLLLAEDGDKDILKQQKQVLTEFAKAVVGLKTKLNVALGTEVDSSEATVWNFSLGQLDDKWAGIESAMTDEGTEILDQIRDLYRARLLNGIVPAGKTLSQAKVDDYAQHHEDLELFKDYLKQLEDDGTAKAIRQLYDRYIDGDDAKPFVREDFVKALTKEVTAHPNAKSPELLERLAQPDFMLKQRNKANGAIPVQMQQRELDQIIKNQSVYYDWLAAPNPVEKHRKSMPYQLDELLNFRIPYYVGPLVTAKEQKAAQGGVFAWMVRKDPDGNITPYNFDEKVDREASANTFIQRMKTTDTYLIGEDVLPKQSLLYQSYEVLNELNNVRVNDNKLSFDQKQQVLGELFERHNTVTIKQFVDNLLAHGDYDRIPEVRGLADEKRFLSSLSTYNQLKGILHEAIDDADKQTDIENIIAWSTIFEDKAIFKTKLNEISWLNAGMINSLANIRYRGWGQFSHKLLNELTLSTGRTVFEELLISSRNLMQILTDEVLKQKIAELNAHELKASGIYAAIDDAYTSPSNKKALRQVLSVIDDITNAAGQAPNWLYIETADGDGVPGKRTNSRQRKIQEIYANAAQELITGSVRGELEDKIASRADFTDRLVLYFMQGGRDIYTGEPLNIDNLSSYDIDHILPQSLIKDNSLDNRVLVHPLVNREKDTIFASTRFAKQMNGMWRQWHAAGLISSRKLRNLQMRPDEIDKYASGFVARQLVETRQIIKLTEQIVADQYPDTKIIAVKAGLSSQLRKELDFPKNREVNHYHHAFDAFLAARIGTYLLKRYPNLEPFFTYGKFKKTEVKKLKSFNFIRDMTHAKDKIVAKETGEIVWDNASDINELDRIYNFKRMLITHEVRFETASLFKQTLYAAKNSKNRGGSRQLIPKKKGYLVDIYGGYTQETGSYLSVVRLTKKAMYAVVKVSTRDAAKLAVAKSISEQKENETLKKIIDGKLSKTSKKGKTTHQLFEIVLPRVGQKTLFKNSKYNQFLVNSDTYMHNYQELWMPREYQRMWKDILLSNHGDAQLEGQLDQIFKFIVSQVNSYFNLYDINQFRKKIADATDKFAKLPTHDTDNARGKIATIGQLLIGLQANAMRSDLRNLDIKTPFGLLQIGTGITLDLDTSIIYQSPTGLFEREVPLTDL

SEQ ID NO: 1005 - protein, 700 aa, Lactobacillus casei
MTKLGKPYGIGVDIGSNSIGFAAVDENSHLIRLKGKTVIGARLFEEGKAAADRRASRTTRRRLSRNRWRLSFLRDFFESHITPTDPNFFMRQKYSEISPKDKARYKYEKRLFNDRTDAEFYQQYPTMYHLRTRLLTDPSKADVREIYFAIHHILKSRGHFLTSGYAKDFNTNKVALNEIFPALQDAYAQVYPDLDITFDENKVNEFKTVLLDEKATPSDTQRALVNLLLAEDGDKDILKQQKQVLTEFAKAVVGLKTKLNVALGTEVDSSEATAWNFSLGQLDDKWAGIESAMTDEGTEILDQIRDLYRARLLNGIVPAGKTLSQAKVDDYEQHHEDLELFKDYLKQLEDDGMAKAIRQLYDRYIDGDDAKPFVREDFVKALTKEVTAHPNAKSPELLERLVQPDFMLKQRNKANGAIPVQMQQRELDQIIKNQSVYYDWLAAPNPVEKHRQSMPYQLDELLNFRIPYYVGPLVTAKEQKAAQGGVFAWMVRKDPDGNITPYNFDEKVDREASANTFIQRMKTTDTYLIGEDVLPKQSLLYQSYEVLNELNNVRVNDNKLSFDQKQQVLGELFERHNTVTIKQFVDNLLAHGDYDRIPEVRGLADEKRFLSSLSTYNQLKGILHEAIDDSDKQTDIEKIIAWSTIFEDKAIFKTKLNEISWLNAGMINSLANIRYRGWGQFSHKLLNELTLSTGRTVFEA

SEQ ID NO: 1006 - protein, 330 aa, Lactobacillus casei
MTKLGKPYGIGVDIGSNSIGFAAVDENSHLIRLKGKTVIGARLFEEGKAAADRRASRTTRRRLSRNRWRLSFLRDFFESHITPTDPNFFMRQKYSEISPKDKNRYKYEKRLFNDRTDAEFYQQYPTMYHLRNRLLTDPSKADVREIYFAIHHILKSRGHFLTPGDAKDFNTNKVALNEIFPALQDAYAQVYPDLDITFDENKMNEFKTVLLNEKATPSDTQRALVNLLLAEDGDKDILKQQKQVLTEFAKAVVGLKTKLNVALGTEVDSSEATAWNFSLGQLDDKWAGIESAMTDEGTEILDQIRDLYRARLLNGIVPAGKTLSQAKVDD

SEQ ID NO: 1007 - protein, 330 aa, Lactobacillus casei
MTKLGKPYGIGVDIGSNSIGFAAVDENSHLIRLKGKTVIGARLFEEGKAAADRRASRTTRRRLSRNRWRLSFLRDFFESHITPTDPNFFMRQKYSEISPKDKNRYKYEKRLFNDRTDAEFYQQYPTMYHLRNRLLTDPSKADVREIYFAIHHILKSRGHFLTPGDAKDFNTNKVALNEIFPALQDAYAQVYPDLDITFDENKMNEFKTVLLNEKATPSDTQRALVNLLLAEDGDKDILKQQKQVLTEFAKAVVGLKTKLNVALGTEVDSSEATAWNFSLGQLDDKWAGIESAMTDEGTEILDQIRDLYRARLLNGIVPAGKTLSHAKVDD

SEQ ID NO: 1008 - protein, 1361 aa, Lactobacillus casei
MTKLGKPYGIGVDIGSNSIGFAAVDENSHLIRLKGKTVIGARLFEEGKAAADRRASRTTRRRLSRNRWRLSFLRDFFESHITPTGPNFFMRQKYSEISPKDKARYKYEKRLFNDRTDAEFYQQYPTMYHLRNRLLTDPSKADVREIYFAIHHILKSRGHFLTSGYAKDFNTNKVALNEIFPALQDAYAQVYPDLDITFDENKVNEFKTVLLNEKATPSDTQRALVNLLLAEDGDKDILKQQKQVLTEFAKAVVGLKTKLNVALGTEVDSSEATVWNFSLGQLDDKWAGIESAMTDEGTEILDQIRDLYRARLLNGIVPAGNTLSQAKVDDYAQHHEDLELFKDYLKQLEDDGTAKAIRQLYDRYIDGDDAKPFVREDFVKALTKEVTAHPNAKSPELLERLAQPDFMLKQRNKANGAIPVQMQQRELDQIIKNQSVYYDWLAAPNPVEKHRKSMPYQLDELLNFRIPYYVGPLVTAKEQKAAQGGVFAWMVRKDPDGNITPYNFDEKVDREASANTFIQRMKTTDTYLIGEDVLPKQSLLYQRYEVLNELNNVRVNNEKLSIEQKQQVIRELFERHNSVTIKQFAENLRAHGDYAHIPEIRGLADEKRFLSSLSTYRQLKSLLPDAIDDPAKQADIENIIAWSTVFEDAAIFKTKLKEINWLDSQTITKLSNIRYRGWGQFSHKFLNGLTLGNGHTIIQELFLSNNNLMQILTDETLQKKMTELNADKLKAANINDAIDDAYTSPSNKKALRQVLRVIEDIKRAADGQDPSWLYVETADGGGTPGKRTRARQHQLQEIYANAAHELIDSAVRGELEDKIADKADFNDRLVLYFMQGGRDIYTGTPLNIDQLSSYDIDHILPQSLIKDNSLDNRVLVHAIINREKNATFASTIYAQKMNATWRQWHEAGLISGRKLRNLQMRPDQIDKYASGFVARQLVETRQIIKLTEQIVAAQYPETKIIAVKAGLSHQLREELEFPKNRDVNHYHHAFDAFLAARIGTYLLKRFPNLQAFFTYGKFKKADVKKLRGFNFIRDITHAEDKIVVKDTGEVIWDKKRDVDELDRIYNFKRMLITHEVHFEKADLFKQTVYGAKDSKEAGGKKQLISKKKGYPVDIYGGYTQETGSYLSVVRLTKKAMYAVVKVSTRDAAKLAVAKSISEQKENETLNDIIDEKLSKISKNGKITHELFEVVLPRVGQKTLFKNSKYNLFLVNSDTYMHNYQELWMPREYQKMWKDISLSKYGDAQTEDQLDQIFGFIVSQVNSYFNLYDINQFRKKLNDAADKFATLPMRDTDDMQGKIATIGQLLIGLQANAARSDLRNLDIKTPLGLLQIPNGISLDSDTSVVYQSPTGLLEREVHLSDL

SEQ ID NO: 1009 - protein, 1128 aa, Lactobacillus casei
MTKLGKPYGIGVDIGSNSIGFAAVDENSHLIRLKGKTVIGARLFEEGKAAAKRRAGRTTRRRLSRNRWRLSFLRDFFESHITPTDPNFFMRQKYSEISPKDKARYKYEKRLFNDRTDAEFYQQYSTMYHLRNRLMTDPSRADVREIYFAIHHILKSRGHFLTPGDAKDFNTNDVALDEIFPALQDAYAQVYPDLGITFDEDKANEFKTILLNEIATSIDTQRALVKLLLAEEDDKDILKQQKQVLTEFAKAVVGLKTKLNLALGTEVDSSEATAWNFSLGQLDDKWAGIESAMTDEGTEILDQIRDLYRARLLNGIVPTGKTLSQAKVDDYTQHHEDLQLFKAYLKQLEDDGTAKAIRQLYDRYIDGDDAAPFLRENFVKALTKDVTAHPNTKSPELLERLAQPDFMLKQRNKANGAIPVQMQQRELDQIIKNQAVYYDWLAAPNPVEKHRKSMPYQLDELLNFRIPYYVGPLVTAKEQKAAQGGVFAWMVRKDPEGNITPYNFDEKVDREASANTFIQRMKTTDTYLIGEDVLPKQSLLYQRYEVLNELNNVRVNNEKLSIEQKQQVIRELFERHNSVTIKQFAENLRAHGDYAHIPEIRGLADEKRFLSSLSTYRQLKSLLPEAIDDPAKQADIENIIAWSTVFEDAAIFKTKLKEISWLGSEAITKLSNIRYRGWGQFSRKFLNGLTLGNGHTIIQELLLSTNNLMQILTDETLQKKMTELNADKLKTANINDAIDNAYTSPSNKKALRQVLRVVDDIKRAADGQDPSWLYVETADGGGTPGKRTRARQHQLQEIYANAAHELIDTAVRGELEDKISDKADFNDRLVLYFMQGGRDIYTGAPLNIDQLSSYDIDHILPQSLIKDNSLDNRVLVHAIINREKNATFASTIYAQKMNATWRQWHEAGLISGRKLRNLQMRPDQIDKYASGFVARQLVETRQIIKLTEQIVAAQYPDTKIIAVKAGLSHQLREELEFPKNRDVNHYHHAFDAFLAARIGTYLLKRFPNLQAFFTYGKFTKADVKKLRGFNFIRDITHAEDKIVAKDTGEVVWDKQRDVDELDRIYNFKRMLITHEVRFETADLFKQTVYGARDSKEAGGSKQLIPKKKDIQLIFMGAISERTRPILPL

SEQ ID NO: 1010 - protein, 1366 aa, Lactobacillus casei
MTKLGKPYGIGVDIGSNSIGFAAVDENSHLIRLKGKTVIGARLFEEGKAAAYRRASRTTRRRLSRNRWRLSFLRDFFESHITPTDPNFFMRQKYSEISPKDKARYKYEKRLFNDRTDAEFYQQYPTMYHLRTRLLTDPSKADVREIYFAIHHILKSRGHFLTPGYAKDFNTNKVALNEIFPALQDAYAQVYPDLDITFDENKVNEFKTVLLNEKATPSDTQRALVNLLLAKEGDRDILKQQKQVLTEFAKAVVGLKTKLNVALGTEVDSSEATAWNFSLGQLDDKWAGIESAMTDEGTEILDQIRDLYRARLLNGIVPAGKTLSQAKVDDYAQHHEDLELFKDYLKQLEDDGTAKAIRQLYDRYIDGDDAKPFVREDFVKALTKEVTAHPNAKSPELLERLAQPDFMLKQRNKANGAIPVQMQQRELDQIIKNQAVYYDWLAAPNPVEKHRQSMTYQLDELLNFRIPYYVGPLVTAKEQKAAQGGVFAWMVRKDPDGNITPYNFDEKVDREASANTFIQRMKTTDTYLIGEDVLPKQSLLYQSYEVLNELNNVRVNDNKLSFDQKQQVLGELFERHNTVTIKQFVDNLLAHGDYDRIPEVRGLADEKRFLSSLSTYNQLKGILHEAIDDADKQTDIENIIAWSTIFEDKAIFKTKLNEISWLNAGMINSLANIRYRGWGQFSHKLLNELTLSTGRTVFEELLISSRNLMQILTDEVLKQKIAELNAHELKASGIYAAIDDAYTSPSNKKALRQVLSVIDDITNAAGQAPNWLYIETADGDGVPGKRTNSRQRKIQEIYANAAQELITGSVRGEFEDKIASRADFTDRLVLYFMQGGRDIYTGEPLNIDNLSSYDIDHILPQSLIKDNSLDNRVLVHPLVNREKDTIFASTRFAKQMNGMWRQWHAAGLISSRKLRNLQMRPDEIDKYASGFVARQLVETRQIIKLTEQIVADQYPDTKIIAVKAGLSSQLRKELDFPKNREVNHYHHAFDAFLAARIGTYLLKRYPNLEPFFTYGKFKKTEVKKLKSLKSLKSFNFIRDMTHAKDKIVAKETGEIVWDNASDINELDRIYNFKRMLITHEVRFETASLFKQTLYAAKNSKNRGGSRQLIPKKKGYLVDIYGGYTQETGSYLSVVRLTKKAMYAVVKVSTRDAAKLAVAKSISEQKENETLKKIIDGKLSKTSKKGKTTHQLFEIVLPRVGQKTLFKNSKYNQFLVNSDTYMHNYQELWMPREYQRMWKDILLSNHGDAQIEGQLDQIFKFIVSQVNSYFNLYDINQFRKKIADATDKFAKLPTHDTDNARGKIATIGQLLIGLQANAMRSDLRNLDIKTPFGLLQIGTGITLDLDTSIIYQSPTGLFEREVPLTDL

SEQ ID NO: 1011 - protein, 1354 aa, Lactobacillus coryniformis
MTLHYNVGLDIGTNSVGYTIVDDNGKILQVKGKNGYGVRVFKEGATAAERRIFRTTHRRLKRRKWRLRLLQDFFEPYILPQDDGFFIRRKESNLVLNDRDEDTASLFNDRSDRDFYQAYPTIYHLRQALMTEKRQFDVREIYLAMHHIIKYRGHFLLNGTVNNFTNNKIDLHSDFEELNALLLNVIPELKFQIDLDHSTMFQTTLLNTTISRSGRQRDLVKSFYNGSDDKQLAKQQKSVATELLKAILGLKAKFHKLFNLDLLETTEWEFSFDAEDIDDKLAKLEPLMTENQQQVMDILQRIFAAITLNGIVPEGKTLSASKVDSYQKHKQDLKLLKAIAQHSDKKTATVLQTAYNEYINGIASKPLKQEDFYKRLTNAVKKSSDPQVADMLALIDQEKFLPKQRTKENGAIPHQLHQLELERIIDNQKDYYPWLAELNPNQARQKVAKYKLSELVAFRVPYYVGPLIEPEVQQATSNAHFAWMARKEAGPITPWNFDQKVDRNVSAERFIKRMTTKDTYLLAEDVLPLHSLLYQRFIVLNELNNVRVNGQKLTKKQKQAVYQDLFKRQPHVTKKQFKSYLVQTGEFAESSKIEGLANETSFNSGLTTENELRKIFGAQLDEARYQVDFEQIIEWATLFEDAKILRTKLAEITWLTTEQIEKLAGIRYRGWGRFSRKLLAGLRDQNGQQIIDLLWDTPNNFMVIVSQAAFSEAITKENEKLIDRRGAQDVITDLYTSPQNKKALRQVLAIVADVQKAMGGVPPQRIFIEFAREDEKNPRRSVERSRQLEKLYQTISNEFLINSEVRQELKEAVDQKVNFKDRLFLYFLQGGVDLYSGKRINIDQLSHYDIDHILPQSFIKDDSLDNRVLVSQKLNRSKSDSVPLSEFANYKFGPAMQAKWLQLKEAGLLSKRKYDNLTLDPTKLSKFAPLGFVNRQLVETRQVIKLAANLLASEETKVVTIKANMTHQVRKELDFPKNRNVNNYHHAFDAYLTAFVGIFLSKRYPKLKPYFTYGDFQKGNKLPDLKNFNFLYELKNKDRSIDSNTGEIIWDKQRDLAYMNKIYNFKKVTVVHEVLTKSGALYNQTLYKASEDKASGRGTKQLIRKKDNMPTELYGGYTGSTSAFMSIVRLWKKDKPYYKVVGIPTRMAAKLANQAQLLDYLTKKFTTRKLVKKTGDYKTTVERFELVVPKVGFNQLVIDGGQPFMLGSATYQYNARELFISKEAVKALNKQLSTHVDLVQVFDEILVQVNRWFPLYDTNGFREKLSHGRDRFMKLNDSFEEKSDTQIDVLNRILIGFHANAARTNLKILGLGTDLGFMTQQAGIRLTEKAILVHQSPSGLFERKVALRDLKGLR

SEQ ID NO: 1012 - protein, 544 aa, Lactobacillus crispatus
KYYLYFMQLGRDAYTGKPINIDEVSQYYDIDHILPQSFIKDDSLNNRVLVAKPINNGKSDGVPLKLFGDNLATGLGITVKQMWNNWADKGLINKAKQNNLFLDPENINKHQASGFIRKQLVETSQIIKLATTILQAEYPKTKIIVVKASSNHYLRNEFDLYKSREVNDYHHAIDAYLTTICGNLLYQAYPKLRPFFVYGQFKKFSSDPKKENEILKKTKNFDFVAKLLGSKAPNEIRSQQGKVLFEKNKIRLQLNKAYNYKYMLVSRDTTTKNQEMFGMTIYPRAERDIAKSRKLIEKRKGFSTDIYGGYTGTAAAYMAIVRINKTKSSQYKVIAVPMTKRAILNKAEKEGNYEKILKQILSPSILYNDKGKRKAGVISFDIIKGKVPYNQVVQDGNKKFLLKSAIYLCNAKQLVLSEEAMRVITGHWLDSDKQDQELLDVYDEILEKIDRYLPLFDIRDFRNKLHKGREKFLKLNAEDKFKAIIQILKGLHDNSDTGELKDIGITVPFGQLQNNSGITLSSDTILVYQSPTGLFEKRVKISSL

SEQ ID NO: 1013 - protein, 298 aa, Lactobacillus crispatus
MDELNKISVNGKKLSVSVKQELYEDLFKKNNTVSAKQLKNWLIENQKLPYIKIKGLADQTKFNSSLSTYIKLKKSGLFVDKLDSNEFRDDFEKIIEWSTIFEDKQIYIQKLQTIDWLTAKQIQFLQNIRLQGWGRLSKKLLTAIVDSNGQNIIEQLWNSQQIFMSIVNKADIKGTITDANQDLMHSNSMEDILSEAYTSPANKKMIRQVVKVVHDIQKAASGQAPKQIAIEFARESRRNSKLSQTRGHKLQDIYQKISGDIVNKNLKDKLAEYIKNNQLSVWEKTSFQMNKNDQDFLF

SEQ ID NO: 1014 - protein, 279 aa, Lactobacillus crispatus
MNGKKLSVSVKQELYEDLFKKNNTVSAKQLKNWLIENQKLPYIKIKGLADQTKFNSSLSTYIKLKKSGLFVDKLDSNEFRDDFEKIIEWSTIFEDKQIYIQKLQTIDWLTAKQIQFLQNIRLQGWGRLSKKLLTAIVDSNGQNIIEQLWNSQQIFMSIVNKADIKGTITDANQDLMHSNSMEDILSEAYTSPANKKMIRQVVKVVHDIQKAASGQAPKQIAIEFARESRRNSKLSQTRGHKLQDIYQKISGDIVNKNLKDKLAEYIKNNQLNKDKYYTR

SEQ ID NO: 1015 - protein, 538 aa, Lactobacillus crispatus
MQLGRDAYTGKPINIDEVSQYYDIDHILPQSFIKDDSLNNRVLVAKPINNGKSDGVPLKLFGDNLATGLGITVKQMWNNWADKGLINKAKQNNLFLDPENINKHQASGFIRKQLVETSQIIKLATTILQAEYPKTKIIVVKASSNHYLRNEFDLYKSREVNDYHHAIDAYLTTICGNLLYQAYPKLRPFFVYGQFKKFSSDPKKENEILKKTKNFDFVAKLLGSKAPNEIRSQQGKVLFEKNKIRLQLNKAYNYKYMLVSRDTTTKNQEMFGMTIYPRAERDIAKSRKLIEKRKGFSTDIYGGYTGTAAAYMAIVRINKTKSSQYKVIAVPMTKRAILNKAEKEGNYEKILKQILSPSILYNDKGKRKAGVISFDIIKGKVPYNQVVQDGNKKFLLKSAIYLCNAKQLVLSEEAMRVITGHWLDSDKQDQELLDVYDEILEKIDRYLPLFDIRDFRNKLHKGREKFLKLNAEDKFKAIIQILKGLHDNSDTGELKDIGITVPFGQLQNNSGITLSSDTILVYQSPTGLFEKRVKISSL

SEQ ID NO: 1016 - protein, 206 aa, Lactobacillus crispatus
MQLGRDAYTGKPINIDEVSQYYDIDHILPQSFIKDDSLNNRVLVAKPINNGKSDGVPLKLFGDNLATGLGITVKQMWNNWADKGLINKAKQNNLFLDPENINKHQASGFIRKQLVETSQIIKLATTILQAEYPKTKIIVVKASSNHYLRNEFDLYKSREVNDYHHAIDAYLTTICGNLLYQAYPKLRPFFVYGQFKKFSSDPKKRK

SEQ ID NO: 1017 - protein, 857 aa, Lactobacillus crispatus
MTKLNNEYMVGLDIGTNSCGWVATDFDNNILKMHGKRALGSHLFDEGVSAADRRAFRTTRRRIKRRKWRLKLLEEIFDEEMAKVDPNFFARLKESGLSPLDTRKNVSSIVFPTKKMDKQFYKKFPTIYHLRNALMKQDKKFDLRAIYIAIHHIVKYRGNFLSNSSISNFSASKIEIDRFVNELNDLYSIFLPESGVIFDAGNASKVEDIIRNEQMFKLDKIKEIADVLPDTENKSGLKLSKKISKEISKAILGYKAKFEIILQVNVDKTDSSIWNFKLNDENADVNLSEITSDLTDTQLQILDLVRNLFSAISLLNIVDEGSTLSESMIRKYNDHAQDLKLLKTVIKNHSDRKKAHNLQLAYDKYVNNRHFVDVETKKAFPNKHLYRKSDFYEIVKKNLDASKEAVQIRKEIALDKFMPKQRSDENGVIPFQLNQIELDKIIENQGKYYPFLKEINPIKAHRMQAPYKLDELIRFRVPYYVGPMIEPTNSSYPQTRQNQSFAWMVRKAKGRITPWNFDEKVDRQKSANNFIKRLTTKDTYLFGEDVLPANSLLYQKYTVLDELNKISVNGKKLSVSVKQELYEDLFKKNNTVSAKQLKNWLIENQKLPYIKIKGLADQTKFNSSLSTYIKLKKSGLFVDKLDSNEFRDDFEKIIEWSTIFEDKQIYIQKLQTIDWLTAKQIQFLQNIRLQGWGRLSKKLLTAIVDSNGQNIIEQLWNSQQIFMSIVNKADIKGTITDANQDLMHSNSMEDILSEAYTSPANKKMIRQVVKVVHDIQKAASGQAPKQIAIEFARESRRNSKLSQTRGHKLQDIYQKISGDIVNKNLKDKLAEYIKNNQLSVWEKTSFQMNKNDQDFLF

SEQ ID NO: 1018 - protein, 857 aa, Lactobacillus crispatus
MTKLNNEYMVGLDIGTNSCGWVATDFDNNILKMHGKRALGSHLFDEGVSAADRRAFRTTRRRIKRRKWRLKLLEEIFDEEMAKVDPNFFARLKESGLSPLDTRKNVSSIVFPTKKMDKQFYKKFPTIYHLRNALMKQDKKFDLRAIYIAIHHIVKYRGNFLSNSSISNFSASKIEIDRFVNELNDLYSIFLPESGVIFDAGNASKVEDIIRNEQMFKLDKIKEIADVLPDTENKSGLKLSKKISKEISKAILGYKAKFEIILQVNVDKTDSSIWNFKLNDENADVNLSEITSDLTDTQLQILDLVRNLFSAISLLNIVDEGSTLSESMIRKYNDHAQDLKLLKTVIKNHSDRKKAHNLQLAYDKYVNNRHFVDVETKKAFPNKHLYRKSDFYEIVKKNLDASKEAVQIRKEIALDKFMPKQRSDENGVIPFQLNQIELDKIIENQGKYYPFLKEINPIKAHRMQAPYKLDELIRFRVPYYVGPMIEPTNSSYPQTRQNQSFAWMVRKAKGRITPWNFDEKVDRQKSANNFIKRLTTKDTYLFGEDVLPANSLLYQKYTVLDELNKISVNGKKLSVSVKQELYEDLFKKNNTVSAKQLKNWLIENQKLPYIKIKGLADQTKFNSSLSTYIKLKKSGLFVDKLDSNEFRDDFEKIIEWSTIFEDKQIYIQKLQTIDWLTAKQIQFLQNIRLQGWGRLSKKLLTAIVDSNGQNIIEQLWNSQQIFMSIVNKADIKGTITDANQDLMHSNSMEDILSEAYTSPANKKMIRQVVKVVHDIQKAASGQAPKQIAIEFARESRRNSKLSQTRGHKLQDIYQKISGDIVNKNLKDKLAEYIKNNQLSVWEKNSFQMNKNDQDFLF

SEQ ID NO: 1019 - protein, 347 aa, Lactobacillus crispatus
MVNLKSLVLILKKENEILKKTKNFDFVAKLLGSKAPNEIRSQQGKVLFEKNKIRLQLNKAYNYKYMLVSRDTTTKNQEMFGMTIYPRAERDIAKSRKLIEKRKGFSTDIYGGYTGTAAAYMAIVRINKTKSSQYKVIAVPMTKRAILNKAEKEGNYEKILKQILSPSILYNDKGKRKAGVISFDIIKGKVPYNQVVQDGNKKFLLKSAIYLCNAKQLVLSEEAMRVITGHWLDSDKQDQELLDVYDEILEKIDRYLPLFDIRDFRNKLHKGREKFLKLNAEDKFKAIIQILKGLHDNSDTGELKDIGITVPFGQLQNNSGITLSSDTILVYQSPTGLFEKRVKISSL

SEQ ID NO: 1020 - protein, 534 aa, Lactobacillus crispatus
RDAYTDKPINIDEVSQYYDIDHILPQSFIKDDSLNNRVLVAKPINNGKSDGVPLKLFGDNLATGLGITVKQMWNNWADKGLINKAKQNNLFLDPENINKHQASGFIRKQLVETSQIIKLATTILQAEYPKTKIIVVKASSNHYLRNEFDLYKSREVNDYHHAIDAYLTTICGNLLYQAYPKLRPFFVYGQFKKFSSDPKKENEILKKTKNFDFVAKLLGSKAPNEIRSQQGKVLFEKNKIRLQLNKAYNYKYMLVSRDTTTKNQEMFGMTIYPRAERDIAKSRKLIEKRKGFSTDIYGGYTGTAAAYMAIVRINKTKSSQYKVIAVPMTKRAILNKAEKEGNYEKILKQILSPSILYNDKGKRKAGVISFDIIKGKVPYNQVVQDGNKKFLLKSAIYLCNAKQLVLSEEAMRVITGHWLDSDKQDQELLDVYDEILEKIDRYLPLFDIRDFRNKLHKGREKFLKLNAEDKFKAIIQILKGLHDNSDTGELKDIGITVPFGQLQNNSGITLSSDTILVYQSPTGLFEKRVKISSL

SEQ ID NO: 1021 - protein, 278 aa, Lactobacillus crispatus
SVNGKKLSVSVKQELYEDLFKKNNTVSAKQLKNWLIENQKLPYIKIKGLADQTKFNSSLSTYIKLKKSGLFVDKLDSNEFRDDFEKIIEWSTIFEDKQIYIQKLQTIDWLTAKQIQFLQNIRLQGWGRLSKKLLTAIVDSNGQNIIEQLWNSQQIFMSIVNKADIKGTITDANQDLMHSNSMEDILSEAYTSPANKKMIRQVVKVVHDIQKAASGQAPKQIAIEFARESRRNSKLSQTRGHKLQDIYQKISGDIVNKNLKDKLAEYIKNNQLNKDKYY

SEQ ID NO: 1022 - protein, 277 aa, Lactobacillus crispatus
SVNGKKLSVSVKQELYEDLFKKNNTVSAKQLKNWLIENQKLPYIKIKGLADQTKFNSSLSTYIKLKKSGLFVDKLDSNEFRDDFEKIIEWSTIFEDKQIYIQKLQTIDWLTAKQIQFLQNIRLQGWGRLSKKLLTAIVDSNGQNIIEQLWNSQQIFMSIVNKADIKGTITDANQDLMHSNSMEDILSEAYTSPANKKMIRQVVKVVHDIQKAASGQAPKQIAIEFARESRRNSKLSQTRGHKLQDIYQKISGDIVNKNLKDKLAEYIKNNQLNKDKY

SEQ ID NO: 1023 - protein, 1368 aa, Lactobacillus curvatus
MSRPYNIGLDIGTSSIGWSVVDDQSKLVSVRGKYGYGVRLYDEGQTAAERRSFRTTRRRLKRRKWRLGLLREIFEPYITPIDDTFFLRQKQSNLSPKDQRKLYTQTSLFNDRTDRAFYDDYPTIYHLRYRLMTEKRQFDIREIYLAMHHIVKYRGHFLNEAPVSSFKSSEINLVAHFDRLNTIFADLFSESGFQLETDKLAEVKALLLDNQQSASNRQRQALSLIYTPSTNKAVEKQNKAIATELLKAILGLKAKFNVLTGIEAEDVKAWTLTFNAENFDEEMVKLESSLDDNAHQIIESLQELYSGVLLAGIVPENQSLSQAMITKYDDHQKHLKMLKAVREALAPGDRQRLKQAYDQYVDGQENTKAYSKEDFYGDITKALKNNPDHPIVSEIKKLIELDQFMPKQRTKDNGAIPHQLHQQELDRIIENQQQYYPWLAELNPNSKRQTVAKYKLDELVAFRVPYYVGPLITAEQQRQSSDAKFAWLIRKAEGRITPWNFDDKVDRQASANEFIKRMTTTDTYLLAEDVLPKQSLIYQRFEVLNELNGLKIDDQPITTELKQAIFTDLFMQKISVTVKNIQDYLVSEKRYASRPAITGLSDENKFNSRLSTYHDLKMIVGDAVDDVDKQADLEKCIEWSTIFEDGKIYSAKLNEIDWLTDQQRVQLAAKRYRGWGRLSAKLLTQIVNANGQRIMDLLWDTTDNFMRIVHSEDFDKLITEANQMMLAENDVQDVINDLYTSPQNKKALRQILLVVNDIQKAMKGQAPERILIEFAREDEVNSRLSVQRKRQVEQVYQNISNELLNNTEIRNELKDLSNSALSNTRLFLYFMQGGRDMYTGDSLNIDRLSTYDIDHILPQSFIKDNSLDNRVLVSQKMNRSKADQVPTDFTSVELGQKMQIQWEQMLRAGLITKKKYDNLTLNPDHISKYAMKGFINRQLVETRQVIKLATNLLMEQYGEDNIELITVKSGLTHQMRTEFDFPKNRNLNNHHHAFDAYLTAFVGLYLLKRYPKLKPYFVYGEYQKASQQDKWRNFNFLNGLKKDELVDENTEAVIWDKESGLAYLNKIYQFKKILVTRGVHENSGALFNQTLYAAKDDKASGQGGKQLIPAKQDRSTALYGGYSGKTVAYMCIVRIKNKKGDLYKVCGVETSWLAQLKQLTDEDSQKAFLEQKISPQFTKVKKQKGNIIEAVEEFEVIAPHILINQRFFDNGQELTLGSATYKHNEQELILDKTAVKLLNGALPLTQSEELAEQVYDEILDQVMHYFPLYDTNQFRAKLSTGKAAFMKLPWKSQWDGNKMVQVGQQVILDRILIGLHANAAMSDLKVLKMTTPFGMIQQSTGITLSADTQIIYQSPTGLFERRVALRDL

SEQ ID NO: 1024 - protein, 669 aa, Lactobacillus delbrueckii
MAKPKDYTIGLDIGTNSVGWVVTDDQNNILRIKGKKAIGARLFTEGKVAAERRSFRTTRRRLSRRRWRIKMLEELFDEEIAKVDPSFFARLHESWISPKDKRKRYSAIVFPSPEEDKKFHESYPTIYHLRDKLMKDDQKHDIREIYIAVHQMIKARGNFLHDESVETYRSGMSSLGGRSERNILSVQTLEELNDLFAENEGTEEVELNVASAEQINDILTGGHLNADSQKEISNLLLPSSFPSFDDKAKEKQVKKLINNVATNISKAWLGYKADFSTILNLAKVDKDQKKIFAFALQGGDEEDKVQELESLLEQSQTDIVDRLIEIRHAIVLSEIVPVGMTLSEAMIDKYDQHKEDLITLKAVIRNTKDKKKAAKLQAIYDLYVKKRHADLAKAMKLTGIKKRSELLDPEELKKGISSLLDDSPEAVEIKQRLEEKTFLPLQRSNNNGVIPNQLHQVELDEIIKKQSKYYPFLAEKNPDESEEAQKKAPTKLDALLTFRVPYYVGPMITKEEQEAQNGHSFAWMVRRDPQDHEAITPWNFEKKVDKMASATQFIKRMTTKDTYLLGEDVLPASSLKYQLFTVLNELNNLRVNGKKLTSDEKEQVIEGLFKKQKTVKADKFVKYWQAKHIGADIKVKGLSDPSKFNSTMSTYIDFKKIFGDQLNDVNRQR

SEQ ID NO: 1025 - protein, 544 aa, Lactobacillus delbrueckii
MTGCADYDVDHIMPQSFVKDDSLDNRVLVARAVNNQKSDKVPALLFGNKVVADLGITVREMWDKWQKLGMISKRKLSNLLTDPDALTEYRAQGFIRRQLVETSQVIKLTATILQSEFPDSKIIEVPAKYNSIVRKQFDLYKSREVNDFHHAIDAYLSTIVGNYLYQVYPNLRRMFVYGEFKKFSSNAEESAHDVARRVKSMNFLDDLLRGTHGDNIYCRSTGEIVFNRNDIISKLKQAYSFKQMLVTQEVFTKKSALFDQTVYPSPERDSKKRSGLIPRKKGMDTEIYGGYSGNKDAYFVLAEAVKEKGHTLQIVGVPIRALNTLKNSANYSEKLLEIIKPQVMFNKDTGKPIKGIKDVKILMDKIPCRQPVLEGESYYMLASSKYRYSLKQISLSQMSMKYILDYIDDPNFNKHEMINIDQQDEKECLLSVYDEILEKMDKYLPLFDIRSFRKKLHDGRDAFIALPVASEEKKPGEVDVIRKILKGLHANADITNLAELGFGTAALGALVSTGGIKISDDAVFIYQSPTGLFERRVKVSDLLK

SEQ ID NO: 1026 - protein, 1356 aa, Lactobacillus farciminis
MTKKEQPYNIGLDIGTSSVGWAVTNDNYDLLNIKKKNLWGVRLFEEAQTAKETRLNRSTRRRYRRRKNRINWLNEIFSEELAKTDPSFLIRLQNSWVSKKDPDRKRDKYNLFIDGPYTDKEYYREFPTIFHLRKELILNKDKADIRLIYLALHNILKYRGNFTYEHQKFNISNLNNNLSKELIELNQQLIKYDISFPDDCDWNHISDILIGRGNATQKSSNILKDFTLDKETKKLLKEVINLILGNVAHLNTIFKTSLTKDEEKLNFSGKDIESKLDDLDSILDDDQFTVLDAANRIYSTITLNEILNGESYFSMAKVNQYENHAIDLCKLRDMWHTTKNEEAVEQSRQAYDDYINKPKYGTKELYTSLKKFLKVALPTNLAKEAEEKISKGTYLVKPRNSENGVVPYQLNKIEMEKIIDNQSQYYPFLKENKEKLLSILSFRIPYYVGPLQSAEKNPFAWMERKSNGHARPWNFDEIVDREKSSNKFIRRMTVTDSYLVGEPVLPKNSLIYQRYEVLNELNNIRITENLKTNPIGSRLTVETKQRIYNELFKKYKKVTVKKLTKWLIAQGYYKNPILIGLSQKDEFNSTLTTYLDMKKIFGSSFMEDNKNYDQIEELIEWLTIFEDKQILNEKLHSSKYSYTPDQIKKISNMRYKGWGRLSKKILMDITTETNTPQLLQLSNYSILDLMWATNNNFISIMSNDKYDFKNYIENHNLNKNEDQNISDLVNDIHVSPALKRGITQSIKIVQEIVKFMGHAPKHIFIEVTRETKKSEITTSREKRIKRLQSKLLNKANDFKPQLREYLVPNKKIQEELKKHKNDLSSERIMLYFLQNGKSLYSEESLNINKLSDYQVDHILPRTYIPDDSLENKALVLAKENQRKADDLLLNSNVIDRNLERWTYMLNNNMIGLKKFKNLTRRVITDKDKLGFIHRQLVQTSQMVKGVANILDNMYKNQGTTCIQARANLSTAFRKALSGQDDTYHFKHPELVKNRNVNDFHHAQDAYLASFLGTYRLRRFPTNEMLLMNGEYNKFYGQVKELYSKKKKLPDSRKNGFIISPLVNGTTQYDRNTGEIIWNVGFRDKILKIFNYHQCNVTRKTEIKTGQFYDQTIYSPKNPKYKKLIAQKKDMDPNIYGGFSGDNKSSITIVKIDNNKIKPVAIPIRLINDLKDKKTLQNWLEENVKHKKSIQIIKNNVPIGQIIYSKKVGLLSLNSDREVANRQQLILPPEHSALLRLLQIPDEDLDQILAFYDKNILVEILQELITKMKKFYPFYKGEREFLIANIENFNQATTSEKVNSLEELITLLHANSTSAHLIFNNIEKKAFGRKTHGLTLNNTDFIYQSVTGLYETRIHIE

SEQ ID NO: 1027 - protein, 1313 aa, Lactobacillus fermentum
MHYLDEIFAPHLQEVDENFLRRLKQSNIHPEDPAKNQAFIGKLLFPDLLKKNERGYPTLIKMRDELPVEQRAHYPVTNIYKLREAMINEDRQFDLREVYLAVHHIMKYRGHFLNNASVDKFKVGRIDFYKSFNVLNEAYEELQNGEGSFTIEPSKVEKIGQLLLDTKMRKLNRQKAVAKLLEVKVADKEETKRNKQIATAMSKLVLGYKADFATVAMANGNEWKIDLSSETSEDEIEKFREELSDAQNDILTEITSLFSQIMLNEIVPNGMSISESMMDRYWTHERQLAEVKEYLATQPASARKEFDQVYNKYIGQAPKERGFDLEKGLKKILSKKENWKEIDELLKAGDFLPKQRTSANGVIPHQMHQQELDRIIEKQAKYYPWLATENPATGERDRHQAKYELDQLVSFRIPYYVGPLVTPEVQKATSGAKFAWAKRKEDGEITPWNLWDKIDRAESAEAFIKRMTVKDTYLLNEDVLPANSLLYQKYNVLNELNNVRVNGRRLSVGIKQDIYTELFKKKKTVKVSDVASLVMAKTRGVNKPSVEGLSDPKKFNSNLATYLDLKSIVGDKVDDNRYQTDLENIIEWRSVFEDGEIFADKLTEVEWLTDQQRSALVKKRYKGWGRLSKKLLTGIVDENGQRIIDLMWNTDQNFMQIVNQPVFKEQIDQLNQKAITNDGMTLREWVESVLDGAYTSPQNKKAIWQVVRVVEDIVKAVGNAPKSISIEFARNEGNKGEITRSRRTQLQKLFEDQAHELVKDTSLTEELEKAPDLSDRYYLYFTQGGKDMYTGDPINFDEISTKYDIDHILPQSFVKDDSLDNRVLVSRAENNKKSDRVPAKLYAAKMKPYWNQLLKQGLITQRKFENLTMDVDQNIKYRSLGFVKRQLVETRQVIKLTANILGSMYQEAGTDIIETRAGLTKQLREEFDLPKVREVNDYHHAVDAYLTTFAGQYLNRRYPKLRSFFVYGEYMKFKHGSDLKLRNFNFFHELMEGDKSQGKVVDQQTGELITTRDEVAKSFDRLLNMKYMLVSKEVHDRSDQLYGATIVTAKESGKLTSPIEIKKKRPVDLYGAYTNGTSAFMTIIKFTGNKPKYKVIGVPTTSAVGLKRVGKPGSESYNQELHRIIKSNPKVKKDFEIVVPHVSYSQLIVDDDCKFTLASDTYQHPATQLVLSKESMEIIADDFKFVKENTATADEQLVRVFDEIVNQMNHYFTIFDQRSNRQKVTKARDKFVSLPTESEYEGAKKTQVGKTEVITNLLMGLHANSAQGDLKVLGLSTFGFFQSSGGLNLSEDAMIVYQSPTGLFERRICLKDI

SEQ ID NO: 1028 - protein, 1327 aa, Lactobacillus florum
MTEQQQPYNIGLDIGTSSIGWAVTDQNDKLLHIRGHNGIGVRLFKEGESAAERRGFRTTRRRLSRRRWRLRFLDRIFDAELAKVDPNFLARLKQSNISPLDPNKQMFGNILFDDPQFDDQKFHQQYPTIYHLRSALAQPDAPQADVRLIYLALHHMIKFRGHFLNGAAVEKFHGGQLHLESEFQELNQIFSNQQRDHVQLQTSSLDEVATILKDNQRTPSDRQRELSARLFVPVDKTIDKENKKLATELLKAVLGLKAKFDVILGVEATDPQAFKLQFSSDDFDDKIAELASELTDEANEILTVLQRLYFSLNLADILTNRQTKQVADSISTAMINRYDDHKHHLKMLKELEAQVTQEQRDGLKKAYDEYIDGDKPTIDTFYTNIKKNLDDSELANQIKSLIDLQAFMPKQRSKENGSIPHQLHQRELDQLIEVQGKYYPWLLAAKDKLDALIAFRVPYYVGPMIDPNQSDDPQNTKFAWMVRKEAGEITPWNFEEKVDKTSSATNFIKRMTTTDTYLLGEPVLPKNSLLYQQFTVLNELNKLKVNGKALTVDQKKYLYEHVCKKQRRVTLKKLSDCLMARGDFPMGAIFTGTTDQKNMNNTLKTYQDFQEIFGDEIDNPDRQVDFEKMIEWSAIFEDREIFKLKLAELNWLTSEQLERVSKKRYQGWGRLSQKLLTHIVNENGERIIDQLWNTNQNFMEIMGQDSVKQAIQEHNGANVAQTGINETIDELYTSPQNKKAIRQILLVVDDIKKAVGYAPANIMMEFAREDRDDHRLIASRARQLEKTYQEISKNWFDNESVTQELKDQIKNKTKFTDRLYLYFIQGGIDLYTGHPLNIDQLSSYDIDHILPQSFLLDNSLNNRVLTSQAENRVHKEDRLPGETVANKMRPTWKMMREQGLMTQRKYNNLTLKPDQISKFNNRGQFINRQLVETRQVIKLAADIMSQKYQADQTKVVTVKANLTHHMREKFNFYKSRNVNDYHHAFDAYLTLFVGNWLLKEYPKLQPYFVYGDFAKTGTNNLKSFNFLYRFERDHKLNDKGAIDTDKDQQLGYMKRIYRFKKMLVTKQLETNEGALYGQTLYPAPKNDKKTRNLINSKKNRPSDIYGGYSNENGSFLTLVKLKKGSKYDYRLVAVPVSKISEIKESELATIEKAIAPQFLKSSGKYRDFQVVLSKILINQKVIDDGMIFTIGSKSYKHNAKQVVLSDNSIQIVSTLSRISDKEKLITVFDEIVDITSKYLPWYKVNDVEKTKMLFRQMQDIDEMKKIIDNSLIGLHCNASITDLGKVGLSKYWGRFVLTAGISLTVDAQLIYQSPTGLFEHRVKVSDL

SEQ ID NO: 1029 - protein, 1386 aa, Lactobacillus hominis
MTKITEDYIVGLDIGTNSCGWVAMDSKNTILRMHGKTAIGSHLFDAGNSAADRRAFRTTRRRIKRRKWRLKLLEEIFDSHLAKVDPYFFARLKESGLSPLDTRKNVSSIIYPTSLEDKKFYVDNPTIYHLRYKLMTEDRKFDLREVYLAIHHIVKYRGNFLYNTPVKAFEASKIDVKGSLKKLNELYEGLDSEFNVELDSNNALEIENIIRDKKIFKINKVKEINQLLSLKTEDKERTKLMKDVSKQIVNAILGYKTKFETILLKDVSKDEADDWEFKLTDVDADNKFENLIGDLNENEQEILLVIRKLANAITLSNIVEEGKTLSESMKDKYKKHSDDLKLLKQVISDHPDRDKAKKLALAYDLYVNNRHGKILQAKDILEKKKTLSKEDFYKEIKKNLDDSKESQEILDAISLDSFMPKQRTNENGVIPYQLHQLELDKIIENQGKYYPFLKEVNPVSSHLKQAPYKLDELIRFRVPYYVGPLISPNESTKNKQTKKNQNFAWMIRKEQGQITPWNFDQKVDRMASANKFIKRMTTIDTYLLGEDVLPANSLLYQKFTVLNELNNVKINGKRISVPLKQELYNNLFKKNSTVTTNKLKSYLKENYKLIKVEIKGLSDEKKFNSGLTTYNKLKNLKIFDQQIDDPNYNKDFERIIEWSTIFEDKAIYKEKLKTIDWLSDRQIDKLSKIRMQGWGQLSKKLLSQLTDNNGQTIIEQLWDSQNNFMQIVNQADFKDAIAVANQNLLVDTSVEDILNEAYTSPANKKAIRQVVKVVDDIVKATSGKVPKQIAIEFTRDADDNAKISQSRANKLRKVYKEMSNELASETIRNELERVAKDQKLLKDKHYLYFMQLGRDAYTGELIDIDNLEQYDIDHVLPQSFIKDDSLENRVLVKKAVNNGKSDNVPVKLYGNRMATDLGMTIRHMWEKWKEQGLITKTKYNNLIIDPDKINKYESSGFIHRQLVETSQIIKLVSTILQSKYPDTEIIVVKARYNHYLRKRLNLYKSREVNDYHHAIDAYLSAICGNLLYQVYPYLRPFFVYGQYKKFSSEPEKEKIIYDKTRRYNFISQIFENKDNDIISRETKKKVFDKKDIIEKLKRAYNYKYMLVSRETETHDQEMFKMTVYPRLSRDTKKSRNLIPKKKDMPTEIYGGYTNNSDAYMIIARINKKKGPEYRVFGVPMRELVNLRKAEKNGHYKAYLKQVLEPEIMYSKNGKKNKTISSFEIVKAKVPYKQVILDGDKKFMLASSTYVQNAKQLTLSQYSMQAITDNCENDTEEEKALVEAYDEILTNIDKYLPLFDINKFREKLHAGREKFVDLPLAEKKETILQVLNGLHDNAVMPKIKSLGLSTPLGFMQFHTGVSLSENAKLIYQSPTGLFEKRLKISDL

SEQ ID NO: 1030 - protein, 270 aa, Lactobacillus iners
MITYLKDNDDITLSFPKDQLINIFKNSNLNSTEKSDQLKPFFGRTNLEKGIIKLLSGGKQDLSNMFRDETLKNSNYKNLKFSDNRFDDERDGYAADLGDRIDLLILLKQIYDASILESMMSQARVSIDGHKYISSAKVCAYEKHKSDLKRLKSLIKKYLPSEYNNIFRKITEKDNYVAYSKSNITNNKREKALKYVKYVDFTKYLTKKLKTIKTQDAEDDQEIFEIKGELEKQSFLPKQRTLDNSIIPYQLHLMELKKYLIINLNIMTFC

SEQ ID NO: 1031 - protein, 255 aa, Lactobacillus iners
MITYLKDNDDITLSFPKDQLINIFKNSNLNSTEKSDQLKPFFGRTNLEKGIIKLLSGGKQDLSNMFRDETLKNSNYKNLKFSDNTFDDERDGYAADLGDRINLLILLKQIYDASILESMMSQARVSIDGHKYISSAKVCAYEKHKSDLKRLKSLIKKYLPSEYNNIFRKITEKDNYVAYSKSNITNNKREKALKYVEYVDFTKYLTKKLKTIKTQDAEDDKEIFEIKGELEKQSFLPKQRTLDNSIIPYQLHLME

SEQ ID NO: 1032 - protein, 343 aa, Lactobacillus iners
MLAKDDQEGITVKDKIISLLTFRLPYYIGPVNPAVHGKFAWVKRLANGKVTPWNYKEKIDIDASHEEFIKTKLSKCSFLIGCDVLPKNSLLYQKYMVLSELNTIKFNGVNISEKLKDDIYQNLFKNIQKVTKKRLQNYIKEHENIIGDVIVTGIDNAFKQGLVSYLKFKKIIGDKIDDDRYQKVLEKIIRDITLYDECAGKKIKKEYKDSDLFTEDELNKIVKLTFNDWGRLSAELLDQLEGEDTVSGETGKIIEFMQKHNYNLMQLMSKKFTFKYKIDEINKSYYQHDKFNYKSMIDSLYVSPATKRILWQSLKVVHEISKIMKHDPEKIFYRNGTFQRRSS

SEQ ID NO: 1033 - protein, 447 aa, Lactobacillus iners
MLYDHKLIGDKKYARLIRSKAFTDDELAGFIARQLVETRQATKETADLLKRLCPKSRIVYAKAQNASIFRQKFDIPKSRTINDLHHAQDAYLNIVVGNIFDTKFTQDPRNFIKNTKDSRNYNLEKIYDYNVERNNYVAWIAPDSKTNGTIANVKCNLSTKDFRVTRPSFYKKGALFNQNLSRKGSNLAPIKEHSPKSNPLKYGGYSGKNNSFFVVVAGKDNKGKDIVKLIPVNTLIYNKMLHCDYKAKQELLTSYVANNFAINNFRIVKDDIKMYSLVKIDGAYYYLVGGTDERIEVKNAMQLLLSKDSIKAVKILEKESKDQFANIKNYKDIDIKLGRTFNEVISKYTNSVFGKSMLISDKYRKDIFKSVDKSILEFNSLNTIAKADNLLKFVTSMRPAGSVDALKMVGLIERIRKSNVISNFNEFKLINQSVTGLFENEEDLLKL

SEQ ID NO: 1034 - protein, 667 aa, Lactobacillus iners
MQKHNYNLMQLMSKKFTFKSKIDEINKSYYQHDKFNYKSMIDSLYVSPATKRILWQSLKVVHEISKIMKHDPEKIFIEMARSKEDHPKRKLSRKADLKQVYKDSKKQIISIIGKDKYQDLSNELDNKDDRDLRWDNLYLYYTQLGRSMYSLKPIDISELMNKNLYDQDHIFPKSKKYDDSIENRVLVEKELNVKKSDIYPISDANIIPQKIKGQVESFWKMLYDHKLIGDKKYARLIRSKAFTDDELAGFIARQLVETRQATKETADLLKRLCPKSRIVYAKAQNASIFRQKFDIPKSRTINDLHHAQDAYLNIVVGNIFDTKFTQDPRNFIKNTKDSRNYNLEKIYDYNVERNNYVAWIAPDGETNGTIANVKCNLSTKDFRVTRPSFYKKGALFNQNLSRKGSNLAPIKEHSPKSNPLKYGGYSGKNNSFFVVVAGKDNKGKDIVKLIPVNTLIYNKMLHCDYKAKQELLTSYVANNFAINNFRIVKDDIKMYSLVKIDGAYYYLVGGTDERIEVKNAMQLLLSKDSIKAVKILEKESKDQFANIKNYKDIDIKLGRTFNEVVSKYTNSVFGKSMLISDKYRKDIFKSVEKSILEFNHLDTIGKADNLLKFVTLMRPSGSAHSLKMVGLIERIRKSNVISNFNEFKLINQSVTGLFENEEDLLKL

SEQ ID NO: 1035 - protein, 1395 aa, Lactobacillus jensenii; identical to SEQ ID NO: 113

SEQ ID NO: 1036 - protein, 1382 aa, Lactobacillus mucosae
MDIGTNSIGWTAIDDHFSLLRVKGKNAIGVRTFKEGETAADRRGFRTARRRLSRRRWRLQFLDEFFAPYLAEVDPNFLARLKQSDISAKDPAKNQEYMGKLLFPDQEAASDGNGYPTLIQMRKAMPAEKAADFPVFNIYQLRYALMNEKRKFDLREIYLAVHHIVKYRGNFLNNTSVDKFKADQIDFNKSFETLNDLFRQVQPIAPFQIDLTKVDELGKLLLDTKQKKLDRQKAVAKLLPLIEDGTDKEIVKAHQQTAREISKLILGYKAKVGLILQNNLDQTLDMSTENSDDQLMQIAEELDDYQMELINQLSLLYSQIMLNEIVPNGETVSASMLNRYYKHRCQLKELKDYGAAQDKKTREQLDHLYAEYIGQIPKDSKFDFTKDLKKLMDKSDLGQKIKDEIEAGDYLPKQRTSANGVIPHQMHQQELDQIIENQKEYYPWLAEPNPVEKNIKNAKYKLDQLVSFRVPYYVGPMITLADQQKTSKASFAWAVRKKAGKITPWNFYDMIDREKSANNFIKRMTNKDTYLLSEDVLPASSLLYQKFTVLNELNNIRVNGRKLQPALKQAIYTDLFQKRKTVNLKTLTNFLAIHEPTLTKPKIEGLSNGRSFNSSLGTYIDMSKILGDSLDDLNYRDDIEKIIEWSTVFEDSEIYGVKLQEIQWLTNEQREKLVRKRYQGWGRLSKKLLTGITDENGQRIIDLMWDTSKNFMQIVHQPVFEEQIAELNQQLLQDADKAPLEVVDDILADAYTSPQNKKAIRQVVKVVADVVKAVGNAPASISIEFARNEDRNKELKNSRRHSIEKLYHETAEKLVKQTNLLEELGNVKDLNDRYYLYFTQAGRDMYDGTPINIDEISTHYEIDHILPQSFLKDNSLDNRVLVKKSENAAKSDRVPAKLYGAKMRAFWKQLKESQLISNRKYLNLTTDPEQVDKYQMQGFVHRQLVETRQIIKLAANIFGSLYPDSAVIETRAELTKQLREKFSLYKVRDVNDYHHAVDAYLTAFAGHYLYQRYPKLRPMFVYGDYAKIYADDLKRLRSVNLFHDLEKDQYNSGTAVNPETKEKIVDVDWLSDYVSKIQHFKYMLISKAVYTQHGQLYGATILPVAQVDKISAPIGIKDDKPVDIYGAYTNEVAAYMAIVRVNGKKPKYKVVSVPVRMLQRLKMAEQKGHDQYMQTLHDVLLRNFTSLKKNRKTGLKEAVVKDFDVLVPCVRYNQLVIDGDTKFTLGSATYQHNAKQLVLCNHSLETLANNFEYVRKHPDEADERMIMLYDDILDQVNHYFTLYDKNKFREKLNAGRDKYLKLPTFSQFENNKKTAIGKSEAIINILRGLHANAAITNLKCLGVSTPFGQLQSPSGIELSENAKLVYQSPTGLFSREVLLKDL

SEQ ID NO: 1037 - protein, 1382 aa, Lactobacillus pentosus
MKKIVNYNLGLDIGTSSIGYAAIDDQGRPVRHQNKTVMGVRLFKEGKTAESTRIFRGTRRRLSHRHWRLGYLDRIFDNEIAKVDENFLPRLKASKRARSDEKRSFRGSLLFPETGDDAYYQKYPTIYHLRYALITQKKQFDIRLIYLALHHMIKYRGNFLDTTPVSAFNIHDIDLTDQFASLNDCYQLLDMDFEFQFDLNNIEQVQKLLLDETLSKTKRQAAVSKVLVMSTGNKAFDDQQNGIASEFIKALLGGPFDLSKILNLSVADVKSWKLHMTDKDVDDTLNSLVEELDENHKQIVNLLQMIYSQVMMLGLLNGQQSISASMIERYDDHAKHWAALKKLLPALGEQEQSTIIHAYTAYTGHSRTKQLSRAEFYTKVNSILKKHENIAEATGLIELIDRNEFMPKQRDAVNGVIPHQLHQRELQLIIQNQQKYYPFLAAKAYPDADETMIEQLLSFRVPYYAGPLVDRDFINESSDQEQAMQNTKFSWLKRREAGEITPWNFEQKVDVQETANRFIKRLTTKDTYLMTEDVLPKESLIYQRFEVLNELNAIRINDRRLTAENKQLAFQQLFMAGNTKNVSIKKFRNFVFDSLKFPEKVKITGFAGQHNFLAKLSTYHDFKKIFGERVDHTDLQPDFERIVEWCTIFEDRHIYREKLKEIQWLSQSEIDQLVLIRNHGWGRLSKRLLTGIRDSDGRTVMDQLWFGTDNFMRIISQSDFAAAIANENRTQLNQHGLEDVLDSAFMSPQNKKAIRQVLKVVDDIEQTLGCPPKKVMIEFTRSPDKKKQRTVTRLEKVQQAYKAVADQLAGQSIVSELDQYANTHSKLSDTYYLYFMQLGRDLYSGKPIDIDSPMLDDDHILPRAFMKDNSLDNRALTEKPINNTKAAKFPSKVFGQQKEVTDFWKLLRRCGLMSNIKEKHLYLDPDNVDKWTRRGFIHRQLVETSQVIKIVANILNDRYQQSQTEVLEVPARLGTELRECFGWYKVREVNDYHHVFDAYLAAFIGNYLYRRYPKLQPYFVYGNFAELNKAQLKNIKSFNFLYNITDNKRVVKDIETGQTLWDDQIRQQIQHIYEYKYMLTSHEAFTQHKELYGQTIYPRREFKPGTLKAIKQDQPQELYGGYKNLTAAYMCIVKIQARKRRAAEYRVVRVATESLSALQQAKRLGVQAYERCLRQELVRNNEILRTNADPNSAPREFEVLLDRVLCHQMIISDGQKYLLGSHAYKINCMQLVLSNNSMKILSTSIVKLKQMTNEPLVQVYREILDVVNKYFTLYDVNSFRENLNQFFDKFRTLPITNEYESSKSGKKLIHRGQLETLTLILRGLHANSDKVQYGDQSTLLGGFQTKDGIKLSKDSVIQYTSPAGLNVRTVKLRDLEQKEAQK

SEQ ID NO: 1038 - protein, 1361 aa, Lactobacillus pentosus
MNEPYGVGLDIGTNSVGWTVVDMNGRVRKVKGKTALGARLFKEGATAEDRRGFRTTRRRLKRVKWRLRLLREFFDQPISKIDPNFFARRKYSDISPRDPNYNGLAKTLFNDRTDKEFYDDYATIYHLRDKLMTSNRKFDIREIYLAIHHIVKYRGNFLRTGPASQYGSASLHLATSFQKLNDLFAQSEETLNLKLVTDEALLQQIQQILVRTDLSRSEQQRQIWPLMAVLTGASAAEKKRQKNVVVELSKALVGLKAKMNVVTLTEVDAAVVKDWTFTMEESQDKLPEIEEQLSEVGQQIMDEVIQLYASVNLAQLIPAGKRFSQHMVEKYKHHEKNLELLKAYIHSQSDSKRGREIRATYDRYIDGVDSKPVTQEMFYKDLMKYVEADATSNHLAAEIKDEIDSEQFMPKLRTKQNGSIPYQVQQYELDQIISHQKKYYPWLGEENPVAERRGKFPYKLDELVGFRVPYYVGPLITKEDQQATSGAGFAWMVRKADGPITPWNFDQKVDRIASATAFIQRMQTTDTYLIGEDVLPARSLIYQRFMVLNELNNMRVEDRKLAPQQKQRLYNQVFKQHQHVSVKNIQQNLMDAGEYRKTPQITGLADPKGFNSSLSTYHDFKKILLEAIADEHKRADIEKIILWSTTFEDSAIFKQKLEEVAWLTDAQRKQLSGLRYRGWGQLSHKLLTAFKDDKGRSIMDGLWETSDNFMQLRKQPAIETQIKEANQANLTDADIQDTINELYTSPQNKKAIREVMLVLDDIKNAMHGQTPSWIFVEAARGGGVAGRRTQSRSSQIVEAYKGTAKEIVSEKVQHELNEKIKAKADFNTRLVLYFLQNGRDLYTNEAINIDRLSEYDIDHILPQSLVKDDSLDNRVLTSARINREKNDTFASEKFGRKMGAQWRELHRNGLMTQRKLKHLLMRPDEISKHATDFINRQLVETRQVIKLVEELISSEYPAASIVAVKANLTHQFRQTFNFPKLREVNDYHHAFDASLTAFIGMYLLKQYPKLERFFVYGKFAKQPINLTRFNIIRKLAVAEKPIANIETGEILWDKTADIKYFEKLYNYKRLLVTHEVRENYGAMFKQTLFKASYNKSKTLVPKKNHMETSVYGGYSNQETAYLAIVRIPFKSGFKFIVVGIPTRMVAKIKHYQSLGATLNQATHKVIEPKFTKISRKTKQTVISDYEVVLPKVYLDQVVRDQVKGQMYRFSLGSDKEYHNVQELYLPLSIQQAFVGHYDESDDQRSNDLVKVYDAALKQLQRYFPLHLSRNFDQVASQAHQSFEGLKNNVQTSDKQLGKKEVLNSLFVGLHANATRSNLSVLGMSKDFGRIKSNGITLTDQAEIIYQSPTGLFERKVALKDL

SEQ ID NO: 1039 - protein, 1358 aa, Lactobacillus pentosus
MNEPYGVGLDIGTNSVGWTVVDMNGRVRKVKGKTALGARLFKEGATAEDRRGFRTTRRRLKRVKWRLRLLREFFDQPISKIDPNFFARRKYSDISPRDPNYNGLAKTLFNDRTDQEFYHDYPTIYHLRDKLMTSDRKFDIREIYLAIHHIVKYRGNFLRTGPASQYGSASLHLATSFQKLNDLFAQSEESLNFKLVTDEAQLQQIQQILVRTDLSRSEQQRQIWPLMVVLMGATAAEKKRQKDFAKELANALVGLKAKLNVVTLTNVDTTVVKDWTFTLEESQDKLPEIEEQLSEVGQQIMDEVIQLYASVNLAQLIPAGKRFSQHMVEKYNHHEKNLELLKAYIHSQSDSKRGREIRATYDRYIDGVKSKPVTQEMFYKDLMKYVEADATSNHLAAEIKDEIDSEQFMPKLRTKQNGSIPYQVQQYELDQIISHQKKYYPWLGEENPVAERRGKFPYKLDELVGFRVPYYVGPLITKEDQQATSGAGFAWMVRKADGPITPWNFDQKVDRIASATAFIQRMQTTDTYLIGEDVLPARSLIYQRFMVLNELNNMRVEDQKLAPRQKQRLYNQVFKQHQHVSVKNIQQNLMDAGEYRETPKITGLADPKGFNSSLSTYHDFKKILPEAIADEHKRADIEKIILWSTTFEDSAIFKQKLEEVAWLTDAQRKQLSGLRYRGWGQLSHKLLTAFKDDNGRSVMDGLWETSDNFMQLRKQPAIETQIKEANQANLTDADIQDTINELYTSPQNKKAIREVMLVLDDIKNAMHGQTPSWIFIEAARGGGVAGRRTQSRSKQIVEAYKSTAKEIVSEKVQHELNEKIKAKADFNTRLVLYFLQNGRDLYTNEAINIDRLSEYDIDHILPQSLVKDDSLDNRVLTSARINREKNDTFASEKFGRKMGAQWRELHRNGLMTQRKLKHLLMRPDEISKHATDFINRQLVETRQVIKLVEELISSEYPSASIVAVKANLTHQFRQTFNFPKLREVNDYHHAFDASLTAFIGMYLLKQYPKLERFFVYGKFAKQPINLTRFNVIRKLAVAEEPIANIETGEILWDKTADIKCFEKLYNYKRLLVTHEVRENYGAMFDQTIFKATDSRKRLIQKKKGFATETYGGYTGRTLAYLAIVKVVTNKDTQYQVVGIPTTMVTQIQQLEASGLTSKQAVTKAIGAMINENNKKLQSYEVLLPKVRFEQVVRDEVKGHIHRFALGTDTYYHNIQELYLPLTIQRAFLGKRNDTDAQTEQNLLTVFETTLAQVNRYFPLYEMNKFKQILNSAQEKFAALPTKNKTVKNKLVTGKDGVLNNLFIGLHANASLGDLKILGMKIGFGKLQVPGGLKLTDQAEIIYQSPTGLFERKVALKDL

SEQ ID NO: 1040 - protein, 1358 aa, Lactobacillus plantarum
MKEPYGVGLDIGTNSVGWTVVDASGHVRKIKGQTGIGVRLFKEGAAAADRRGFRTTRRRLKRVKWRLRLLREFFDQPISKVDINFFARRKYSDVSPRDPNYNGLEKTLFNDRSDQDFYHDYPTIYHLREALMTQHRKFDVREIYLAIHHIVKYRGNFLRNDAATAYRSGTLDLQQHFETLNHLFSQADLELNLNLTTDVALLDSIKQTLVRTDISRSDRQKLIMPLLAVLTGATTAEKKRQKAVVTEFAKALVGNKTKIDVLTLTDIDATEAKDWAFSLEENQDKLPGIEDRFSEVGQQIIDEVIRLYASVNLAQLIPEGKRFSQSMVEKYKRHGEDLKLLKAYIRSQSDAKRGRAIRATYDQYIDGVKSKQVTQEAFQKALGKFVDADVDLNSWAAQIKQAIDSEQFMPKLRTKQNGAIPYQVQQNELDQIISNQKEYYPWLGEENPVIKRRGKFPYKLDELFGFRVPYYVGPLITKEMQAATANAGFAWMVRKADGPITPWNFDDKVDRVASATAFIQRMQTTDTYLIGEEVLPARSLIYQRFMVLNELNNIRVDDGQLTPRQKQRLYNQVFKKHKRVTAKNIQDNLVAAREFPTAPRITGLADPKVFNSSLSTYHDLKQVLPEAMSDVRKQADIEKIILWSTIFEDSTIFKQKLTEISWLTAAQLKQLGQLRYRGWGQLLRKLLTGLKDDNNRSIMDGLWETNANFMQLRSQPAIENQIKSANQANLTTADLQDTINELYTSPQNKKAIREVMVVLADIKDAMHGQTPNWIFVEAARGGGVAGRRTQSRSKQIVAAYQGTAQAIVRDQVQRELKEKIKNKANFNTRLVLYFLQNGRDLYTGDAINIDRLSEYDIDHILPQSLVKDDSLDNRVLTNARINREKNDTFASEKFGKKMGAKWKEMHRMGLMTKRKLDHLLMRPDEISKYATGFINRQLVETRQVIKLVEELINAEYPSTAIVSVKANLTHQFRQTFDFPKIREVNDYHHAFDAALTAFIGTYLLKRYPKLERFFVYGKFAKQPVNLTRFNVIRKLAKTDTPITDIDTGEVLWDKLTDIKYFETLYDYKRLLVTREVSENYGAMFDQTLLKASDNGKRLIRKKQSFDTAIYGGYTGKTLAYMAIVKVSTKKDVQYQVVGVPTTMVTQIEQLEQQGMTNKQAVTKVIEPLIAANNKKMLTYEVLLPKVRFEQVVRDRIKGQTHRFALGTDTYYHNIQELYLPLTLQRAFLGKQNESEVQLNQNLLTVFDATLAQVNRYFPLYEMNKFKKILNSARDQIELLEAKNQFVKNKLVLGKQGILTNMFIGLHANASYGDLKVLGVKIDFGKLQVPGGIKLTGDAEIIYQSPTGLFERKIALKDL

SEQ ID NO: 1041 - protein, 1361 aa, Lactobacillus rhamnosus
MTKLNQPYGIGLDIGSNSIGFAVVDANSHLLRLKGETAIGARLFREGQSAAERRESRTTRRRLSRTRWRLSFLRDFFAPHITKIDPDFFLRQKYSEISPKDKDRFKYEKRLFNDRTDAEFYEDYPSMYHLRLHLMTHTHKADPREIFLAIHHILKSRGHFLTPGAAKDFNTDKVDLEDIFPALTEAYAQVYPDLELTFDLAKADDFKAKLLDEQATPSDTQKALVNLLLSSDGEKEIVKKRKQVLTEFAKAITGLKTKFNLALGTEVDEADASNWQFSMGQLDDKWSNIETSMTDQGTEIFEQIQEHYRARLLNGIVPAGMSLSQAKVADYGQHKEDLELFKTYLKKLNDHELAKTIRGLYDRYINGDDAKPFLREDFVKALTKEVTAHPNEVSEQLLNRMGQANFMLKQRTKANGAIPVQLQQRELDQIIANQSKYYDWLAKPNPVEKHRASKPYQLDELLTFRIPYYVGPLITPKEQAESRENVFAWMIRKDPSGNITPYNFDEKVDCPASANMFIQRMKNTDTYLIGEDVLPKRSLLYQKYEVLNELNNVSIDGRRLGADQKQRLIREVFERHSSVTIKQVAENLVAHGDFAKRPEIRGLADEKRFLSSLSTYHQLKKILHEAIDDPTKEHDIENIITWSTVFEDAAIFKTELAKISWLDSDTIKALSNIRYRGWGQFSRKLLDGLKLGNGHTVIQELMLSNHNLMQILTDETLKTTMAELNQDKLKADDIEDVINDAYTSPSNKKALRQVLRVVEDIKHAANGQDPSWLYIETADGPGTAGKRTQSRQKQIQTVYANAAQELIDSAVRGELEDKIADKASFTDRLVLYFMQGGRDIYTGAPLNIDQLSHYDIDHILPQSLIKDDSLDNRVLVNATINREKNNVFASTLFASKMAATWRKWHEAGLISGRKLRNLMLRPDEIDKFAHGFVARQLVETRQIIKLTEQIAAAQYPNTKIIAVKAGLSHQLREELDFPKNRDVNHYHHAFDAFLAARIGTYLLKRYPKLAPFFTYGEFAKVDVKKFREFNFIGALTHAKKNIVAKDTGEIVWDKERDIQELDRIYNFKRMLITHEVYFETADLFKQTIYAAKDSKERGGSKQLIPKKQGYPTQVYGGYTRENTAYLAVVKTVEKKADVYRVVRIATSQVAALKEARAQSTVKERELLKKFLTTKFTKIGKNGKKAITPFDIVIPRVPREQLFHNKRYGFFMVNSDTLMHNYQELWMSRSDQQILSKLVKSAKTVENGQVGRLFENIVEQINKYFPLYDINQFRKKLDQSKDIFSKLPLEGNGTTSGKRETIQNILTGAGTGAKNGDLKNLGIKTPFGFLQVPSGIVLDDDTTLIYQSPTGMLNRIVRLSEL

SEQ ID NO: 1042 - protein, 1361 aa, Lactobacillus rhamnosus
MTKLNQPYGIGLDIGSNSIGFAVVDANSHLLRLKGETAIGARLFREGQSAAERRESRTTRRRLSRTRWRLSFLRDFFAPHITKIDPDFFLRQKYSEISPKDKDRFKYEKRLFNDRTDAEFYEDYPSMYHLRLHLMTHTHKADPREIFLAIHHILKSRGHFLTPGAAKDFNTDKVDLEDIFPALTEAYAQVYPDLELTFDLAKADDFKAKLLDEQATPSDTQKALVNLLLSSDGEKEIVKKRKQVLTEFAKAITGLKTKFNLALGTEVDEADASNWQFSMGQLDDKWSNIETSMTDQGTEIFEQIQELYRARLLNGIVPAGMSLSQAKVADYGQHKEDLELFKTYLKKLNDHELAKTIRGLYDRYINGDDAKPFLREDFVKALTKEVTAHPNEVSEQLLNRMGQANFMLKQRTKANGAIPVQLQQRELDQIIANQSKYYDWLAKPNPVEKHRASKPYQLDELLTFRIPYYVGPLITPKEQAESRENVFAWMIRKDPSGNITPYNFDEKVDCPASANMFIQRMKNTDTYLIGEDVLPKRSLLYQKYEVLNELNNVSIDGRRLGADQKQRLIREVFERHSSVTIKQVAENLVAHGDFAKRPEIRGLADEKRFLSSLSTYHQLKKILHEAIDDPTKEHDIENIITWSTVFEDAAIFKTELAKISWLDSDTIKALSNIRYRGWGQFSRKLLDGLKLGNGHTVIQELMLSNHNLMQILTDETLKTTMAELNQDKLKADDIEDVINDAYTSPSNKKALRQVLRVVEDIKHAANGQDPSWLYIETADGPGTAGKRTQSRQKQIQTVYANAAQELIDSAVRGELEDKIADKASFTDRLVLYFMQGGRDIYTGAPLNIDQLSHYDIDHILPQSLIKDDSLDNRVLVNATINREKNNVFASTLFASKMAATWRKWHEAGLISGRKLRNLMLRPDEIDKFAHGFVARQLVETRQIIKLTEQIAAAQYPNTKIIAVKAGLSHQLREELDFPKNRDVNHYHHAFDAFLAARIGTYLLKRYPKLAPFFTYGEFAKVDVKKFREFNFIGALTHAKKNIVAKDTGEIVWDKERDIQELDRIYNFKRMLITHEVYFETADLFKQTIYAAKDSKERGGSKQLIPKKQGYPTQVYGGYTRENTAYLAVVKTVEKKADVYRVVRIATSQVAALKEARAQSTVKERELLKKFLTTKFTKIGKNGKKAITPFDIVIPRVPREQLFHNKRYGFFMVNSDTLMHNYQELWMSRSDQQILSKLVKSAKTVENGQVGRLFENIVEQINKYFPLYDINQFRKKLDQSKDIFSKLPLEGNGTTSGKRETIQNILTGAGTGAKNGDLKNLGIKTPFGFLQVPSGIVLDDDTTLIYQSPTGMLNRIVRLSEL

SEQ ID NO: 1043 - protein, 1352 aa, Lactobacillus ruminis
MNDNFDLMRVKGKKGIGVRLYNEGQSAAERRMHRTARRRYGRRKWRLRLLEDFFDEHMAEVDDTFFARLKDSNISPKDDKKYRKSLLFPKSKGVTYQDDGEFYKKYPTMYHLRYALMTEHRKFDLREIYLAFHHMVKYRGNFLYDTSVDSFEAKNLDIKGKFDEINDLLSSYTDFYVDNSNAALVESILLEKNTTRKDKSKKIAKLLHVEDKEKGKNKKAKDLATQISNAVLGLKCNFHLIFELQQKYSFDLCSEKTEENIAKLSEVLDENQKMLLMILKEVQDQVMLNAFVPSGMSLSEAMMQKYDDYGEQLKIYHELEHSVSDDSAAKLRGAYRDYNDNIIKRIDGDNKKDTFYKRVKNILTKISKEYVDQDVLESCGKLKKLIDENKLFIRQRTAANGVLPHQLHQIEMRKIIDNQKEYYPWLAEPNPNEKRRVYSKYKVEELIAFRIPYYVGPLVDPNNADKNKEARFSWMVRKKDGEITPWNFYDKVDWAESANNFIERMKSKDTYLLGEDVVPKESMLYQKYEVLNELNNLRINDSGLSDSFEDVKLKQAIYNDLFKKQKIVKITDLQNYLVQNHKYLVKPKISGLADENRFLSSLSTYSDLKTIFGDKVDDRTYFNDFEKMVEYSTVFEDGHDYNQKLDEYTWLTKEEKYKIGKKRYRGWGKLSKKLLTGLRDKNNHTIMDNLWETNRNFMQIQTADEFSKQIAEENERHLKGSVSDAINDMYTSPANKKAIRQVLRVVDDIQKAMGYAPSSISLEFAREDGPSVRTVSRANRMKSIYEKYASEVSEEVMKDLDGVIKDKKGLNDRLYLYFEQQGKDMYSGHPLDFDKVISGQEYDIDHILPQAVIKDDSLDNRVLTTKALNNDVKSKGVPCRMFNGMHSFWKNLYDKGFISRRKFNNLTTNPENIDKYKMKGFVNRQLVETRQIIKLVANVLNDKYQNDDVDIIEVRAELTHDVRKHFKFYKNRNVNDYHHAFDAYLTSFIGHYLFKKYPNLRPLFDYNDFMKVSDNVFKQLRGNNFLGEFLNKTGDIISTDGNFVLNKEEMINKLNKAYAFKKILVTKEVGQRTGAMFNETRYPAPNSRKAALKYRRMPKPDSLISVKDYKNTDIYGGYSGKNDAYMVIVDMGKQYMVVGVPVRYTEKLDKLRIKHSELYRDELRKVLSRDKTLLDSKGNVKRFDIVLDRVLYGQLIEDGNELFTLGSSKYKRNFRQLFLDKQCIEILDSSATPQPTDEELIWVYDQILDKVDKYFELYDINRQRETLRKGRAAFCSLPNISMKKDDVTKKKILNEILVALHANESESNCEKIGKKVFGRLQVPGGIKLSKEAKLIYQSPTGLFERVVYLKDL

SEQ ID NO: 1044 - protein, 1339 aa, Lactobacillus salivarius
MERYHIGLDIGTSSIGWAVIGDDFKIKKKKGKNLIGTRLFNEGATAAERRGFRTQRRRLNRRKWRLKLLEEIFDPYMAEVDEYFFARLKSSNLSPKDSNKKYLGSLLFPDKSDSNFYDKYPTIYHLRRDLMEKDEKFDLREIYLAIHHIVKYRGNFLEKVPAKNYKNSGASIGFLLEEVNSLYKDIIGDESIAILNSEKFEDVEKIILDEETRNLDKQKSVGKLLVEDKKKKNIVTAFSKAIFGYKFNIEDLLLIENDEKNKLTFNDENIDDIFNELSHSLDDKQMDLLTKTREIYFKFKLNMIVPTGYTLSESMIEKYEMHKAHLKMYKEFINTLNTKDRKILKNAYSDYINTEKAKAANAQENFYKTVKKIIKDNNSDTAKKIIVLIDEGNFMPKQRTGENGVIPHQLHQIELDRIIENQAKYYPWLAEANPVEKNRKFAKYKLDELVTFRVPYYVGPLIDKTESNKNEKETKFAWMVRKAKGTITPWNFENLVDRTESANRFIKRMTSKDTYIIGEDVLPASSLLYEKFKVLNELNNIKVNEKKLDIEQKQDIYLNLFTTAKNVTKKSLATYLNCSADSISGLSDGEKFNSSLSSYIDLKAILGNIVDDCNKNEDLEKIIEYSTVFEDGNIYKEKLSEISWLTDEQIEKLSNIHFKGWGRLSKKLLTQITNENGERIIDALWNTSNNFMQIINDESIQAKLAEINGKYAGKSDLEDILSEAYTSPQNKKAIRQVMKVVEDIEKAMQCEPTSISIEFTRKKQKSRLTNTRYKKISDVYEKIADEVISEYELRKLQSELDSNANNMRDRYYLYFMQLGRDMYTGEKINIDELHQRYDIDHILPQSFIKDDSINNRVLTRKDVNNKEKSDKTAADLYAVEMSDFWRKLRKQGLITEQKYKNLLTKSDSIDKYAKKGFIKRQLVETSQVVKLVANILQDKYSDTKIIEVRAKLNSNLREEYKLIKNRAVNDYHHAIDGYLTTFIGQYLYKTYPKLRSYFVYNDFKKLDSNYLKHMKKFNFLWQLQDDKTIDIYDNVNNKFVLNVPEMKKYIQKIYNYKYMLVSKEVTTKNGAFYDQTKYNAKTVNLIPIKKNKPTNIYGGYKGKVSSYMMLVKIRKKKEVIYKFVGVPRLWTDELDRLKDTTERKILLNEIAKNSLSKTEQDFEVILDKVYYGQLIIDGNQKYTLGSSEYKYNAMQLHLSKHALEVLAKENVKDAEITDKDLVSVYEEILSVVNKYFELYDINKFRQKLNEGLEIFRKLPVYNVYESNKIKQVGKFEVLNRILMGLHANAMITDLKVLGIKTKLGQMQVNGGIKLSPDAKLIYQSPTGIFSRAVRVKDLG

SEQ ID NO: 1045 - protein, 629 aa, Lactobacillus salivarius
MERYHIGLDIGTSSIGWAVTGDDFKIKRKKGKNLIGTRLFKEGNTAAERRGFRTQRRRLNRRKWRLKLLEEIFDPYMAEVDEYFFARLKDSNLSPKDSNKKYLGSLLFPDISDSNFYDKYPTIYHLRRDLMEKDEKFDLREIYLAIHHIVKYRGNFLENVPAKNYKNSGASIGFLLEEVNNLYKDIVGDENVTILNSEKFEDVEKIILDDGIRNLDKQKGVGKLLVEDKKNKNLVTAFSKAIFGYKFNIEDLLLVEGDEKSKLTFNDENIDDIFNELSHSLDDRRMDLLTKTREIYFKFKLNMIVPTGYTLSESMIEKYEIHKAHLKMYKEFINTLNSKDRKILKNAYTDYINNEKAKAANAQENFYKTVKKTIKDNDSDIVKKIIDLIDEGNFMPKQRTGENGVIPHQLHQIELDRIIENQAKYYPWLAEENPVEKNRKFAKYKLDELVTFRVPYYVGPLVDKTESNKNEKETKFAWMVRKSKGTITPWNFENLVDRTESANRFIKRMTSKDTYIIGEDVLPASSLLYEKFKVLNELNNIKVNEKKLDIEQKQNIYLKLFTTTKNVTKKNLATFLNCSIESISGLSDDKKFNSSLSSYIDLKVILGDIVDDYSKNEDLEKIIEYSTIF

SEQ ID NO: 1046 - protein, 897 aa, Lactobacillus salivarius
  misc_feature (822)..(822): Xaa can be any naturally occurring amino acid
MLIESDEKNKLTFNDENIDDIFNELSHSLDDNQMDLLTKTREIYFKFKLNMIVPTGYTLSESMIEKYEMHKAHLKMYKEFINTLNAKDRKILKNAYSDYINNEKAKAANAQENFYKTIKKTIKDNNSDTAKKIIGLIDEGNFMPKQRTGENGVIPHQLHQIELDRIIENQAKYYPWLAEENPVEKNRKFAKYKLDELVTFRVPYYVGPLVDKTESNKNEKETKFAWMVRKAKGTITPWNFENLVDRTESANRFIKRMTSKDTYIIGEDVLPASSLLYEKFKVLNELNNIKVNKKKLDVEQKQHVYLDLFTTRKNVTKDNLATSLNCDVESITGLSDNEKFNSSLSSYIDLKAILGNAVDDCNKNKDLEKIIEYSTIFEDGNIYKEKLSEISWLTDEQIEKLSNIHFKGWGRLSKKLLTQITNENGERIIDALWNTSNNFIQIISDESIQAKLAEINGEYADKSNLEDILDEAYTSPQNKKAIRQVMKVVEDIEKAMKCKPTSIAIEFTRRKGKSKLTNTRYKKISETYEKITDELISEYELGKLQSKLDSKANNMRDIYYLYFMQLGRDMYTGEKINIDELHQYYDIDHIFPRSFIKDNSLNNRVLTRKEINNNEKADRTAADLYAVKMGDFWRKLRKQGLITEKKYKNLLTRTDSIDKYTKQSFIKRQLVETSQVVKMAANILQDKYSNTKIIEVRARLNSDLRKEYELIKNREVNDYHHAIDGYLTIFIGQYLYKTYPKLRSYFVYDDFKKLDSNYLKHMDKFNFIWKLEDKKAEDVYDNVNNEFILNVPKMKDYIQKIYNYKYMLISKEVTTESGAFYXZTKYNAKTINLIPIKKDKPTNIYGGYKGKVSSYMMLVKIQKKKEVIYKFVGVPRLWTDELDRLIDTDEKKALLKK

SEQ ID NO: 1047 - protein, 1419 aa, Unknown
  Lactobacillus sp. 66c
MAKPQNYTIGLDIGTNSVGWTVTDDQNNILRIKSKKAIGARLFEEGKVAAERRSFRTTRRRLSRRKWRIKLLEELFDEEISKVDPNFFARSHESWISPKDKRERYSAIVFPTPEEDKKFHNEYPTIYHLRDRLMKDDQKHDIREIYVAIHHIMKYRGNFLHDESIETYRSGMSSLGGGDERTILNTKILDDLNDAFADNLATQGISVNSASADQINEIVTSGHLNVDSQKAIAKLLLPTTLSSDDKKQDKKIKKLATDAAKNVASAWLGYKANFAAILNIQEVDKDKKKIYSFALQGADEEDKVETLESVLSQDQIEIVDRIIRIRHAIVLGEIIPVGMTLSEAMIEKYDQHAKDLKNLKTVIRNLKDRKNAVKLQAIYDLYVNNRHADTAKAMKLAGVKKRTELLEPEEFNKSIEKLLDDSPVSAEIKKRIAEKDFLPLQRSNSNGVIPNQLHQIELDEIIKKQSKYYPFLGETNEHASADVARKAPTKLDQLLTFRVPYYVGPLITKEEQEEQDGHSFAWMIRKNPKDHEKITPWNFDEKVDRMASATQFIKRMTTKDTYLLGEDVLPSSSLKYQLFTVLNELNNLRINHKKLTREEKEQVIEDLFKKYKTVKADKFKNYWQKGHAGLDVKIQGMADPEKFNSTMSTYIDLQKIFGDQLDDAQRQNDFEKIIEYSTIFEDRKILGEKLRADFVWLSEDQIKRLCRLRLQGWGRLSLKLLTRLTDADGQNVLERLLNSNDNFMQIVKDPVIKAKIEQKNQKLLRADWSENATESILDEAYTSPQNKKAIRQVMRVVHDIVKACDGNLPAKFAIEFARSQDDDPKRTVARADRLQKIYAQISDEVVSQGVKDQLSGMKSLKDRYYLYFMQGGRDAYTGKPLNIDRLSDYDIDHIMPQSFIKDDSLDNRVLVTRAVNNQKSDNVPVLLYGNHLVADLGITIREMWDRWQKSGMISKRKLANLLTDPATLSEYRAEGFINRQLVETSQVIKLTATILQSEFPDSKIIEVPAKYNSILRKQFDLYKSREVNDYHHAIDAYLSTIVGNYLYQVYPNLRRLFVYGEFKKFSHGEEESSHQAVRRVKSMNFLDDLLRGKHGDDIYCRVTGEVIFSRKDIISKLKQAYSFKQMLVTQEVFTKKSALFDQTVYPSPARDSKTRSGLIPRKQGMDTEIYGGYSGNKDAYFVLAQVVKSKGHTLQVVGVPIRALRALANCSNYSEQLLKIVKAQVLFNKKTGKAKKGISDVRILLDKIPYRQPVLDGSAFYMLGSSTYKYNLKQISLSQQSMKYILDYIDDPNFNKHEMTKIDQQNEKECLLSVYDEILDKMDKYLSLYDINGFRKKLHVGRDKFIKLEVEKQAEAIKNVLRGFHANSDMTKLSDLGLSTSLGFMQASDGIKLSDNAVFIYQSPTGLFERRVKVSDLLK

SEQ ID NO: 1048 - protein, 1289 aa, Lactobacillus versmoldensis
MRRRYRRRRNRLNWLDELFADELAKIDPSFLLRMKNSWVSKKESTRKRDPYNLFIDEKYNDVDYFNQYPTIFHLRKELITEDKKVDIRLIYLAIHNIIKYRGNFTLENQNFDISQLSSNFSQQISDFFALFSDFGVIMPEDFDPDKISDILLNPNLSPSGKVSEAIATISPKTNVKAKIKIILLLLVGNNGDLKKLFDLETTEKIAVKLSSRHIDSELPIILSELNEQQENIITIANSIFGSIILKDFLGDETSISAAKVISFEDHKQDLQKLKTMWRETSNKEAVKAGKKAYEDYIGHEDSETFYKKIKKFLEKAQPVDLANKALAEIELENYLPKQRNRNNTVIPYQLNENELIAILDHQEKYYPFLKENRDKILSLLTFRIPYYVGPLQDSNNNRFSWMTRKASGAIRPWNFSEKVNVEQSSNDFIKRMRSTDTYLIGEPVLPKKSLIYQCYEVLSELNNTRVKDGSSNPKRLDVTIKQRIYNEIFKNQKSVSVKVLQNWLIKESYFKSPEISGLADKKKYLSSLSTYIDFKKIFGQRFVDDPVNSPQLEELAEWLTLFEDKKILLIKLQNSKYSYDQATINKLSTMRYQGTGKLSKKLLVDLKTTKKSIGKSGAESLSILDLMWSTKDNFMQIIHDADYTFEQQIKEFNYDTEDELTPLEKVANLHGSPALKRGLNQSIKVVADIVKFMGHDPEKIFIEFTRSDDFSKLTISRYRRIKKQYLEIAKAIKKIPAEFKDIKEYQTQLEENKGKLASERLMLYFLQCGHSLYSNKPIDLNMINSSKYHVDHILPQSYIKDDSLENKALVLASENENKIDNMLISHDIIATNLPRWQALKDQNLMGSKKFADLTRTTVTENQKKGFIQRQLVQTSQIVKNITLILNDLYKNTSCIETRATLSSEFRKAFSNFDETTYHYQFPEFVKNRDVNDFHHAQDAFLACVIGEYQLKKYPKDNLRLVYDQYSKFLDSLKKDTRKKNGRMPRYTQNGFIIGSMFNGKTYVDDNGEIIWDQKIKESIRKTFNYHQFNVVRQTIEQHGKLFNDTIQPHSDRYKLIPLKTNRDPAIYGGYNNDNNAYSVVLDVDGKKKINGIPIRIANQLKSDELDLSSWLENNIKHKKPMTILIDKVPKYQRIINEETGDLLITSANEVINNVQLFLPSMYTALISLLDSTKTEMYSKLLSNYEANILIDIYDYLLTKLKNNYPLYRKEWAKLAEHRDDFIESDLVTQASTLQQLIKFMHADPSNVNLKFGNFKGNRFGRKNGNIKLSKTDFIYESPTGLFKSIKHID

SEQ ID NO: 1049 - protein, 1372 aa, Legionella pneumophila
MESSQILSPIGIDLGGKFTGVCLSHLEAFAELPNHANTKYSVILIDHNNFQLSQAQRRATRHRVRNKKRNQFVKRVALQLFQHILSRDLNAKEETALCHYLNNRGYTYVDTDLDEYIKDETTINLLKELLPSESEHNFIDWFLQKMQSSEFRKILVSKVEEKKDDKELKNAVKNIKNFITGFEKNSVEGHRHRKVYFENIKSDITKDNQLDSIKKKIPSVCLSNLLGHLSNLQWKNLHRYLAKNPKQFDEQTFGNEFLRMLKNFRHLKGSQESLAVRNLIQQLEQSQDYISILEKTPPEITIPPYEARTNTGMEKDQSLLLNPEKLNNLYPNWRNLIPGIIDAHPFLEKDLEHTKLRDRKRIISPSKQDEKRDSYILQRYLDLNKKIDKFKIKKQLSFLGQGKQLPANLIETQKEMETHFNSSLVSVLIQIASAYNKEREDAAQGIWFDNAFSLCELSNINPPRKQKILPLLVGAILSEDFINNKDKWAKFKNFWNTHKIGRTSLKSKCKEIEEARKNSGNAFKIDYEEALNHPEHSNNKALIKIIQTIPDIIQAIQSHLGHNDSQALIYHNPFSLSQLYTILETKRDGFHKNCVAVTCENYWRSQKTEIDPEISYASRLPADSVRPFDGVLARMMQRLAYEIAMAKWEQIKHIPDNSSLLIPIYLEQNRFEFEESFKKIKGGSSDKTLEQAIEKQNIQWEEKFQRIINASMNICPYKGASIGGQGEIDHIYPRSLSKKHFGVIFNSEANLIYCSSQGNREKKEEHYLLEHLSPLYLKHQFGTDNVSDIKNFISQNVANIKKYISFHLLTPEQQKAARHALFLDYDDEAFKTITKFLMSQQKARVNGTQKFLGKQIMEFLSTLADSKQLQLEFSIKQITAEEVHDHRELLSKQEPKLVKSRQQSFPSHAIDATLTMSIGLKEFPQFSQELDNSWFINHLMPDEVHLNPVRSKEKYNKPNISSTPLFKDSLYAERFIPVWVKGETFAIGFSEKDLFEIKPSNKEKLFTLLKTYSTKNPGESLQELQAKSKAKWLYFPINKTLALEFLHHYFHKEIVTPDDTTVCHFINSLRYYTKKESITVKILKEPMPVLSVKFESSKKNVLGSFKHTIALPATKDWERLFNHPNFLALKANPAPNPKEFNEFIRKYFLSDNNPNSDIPNNGHNIKPQKHKAVRKVFSLPVIPGNAGTMMRIRRKDNKGQPLYQLQTIDDTPSMGIQINEDRLVKQEVLMDAYKTRNLSTIDGINNSEGQAYATFDNWLTLPVSTFKPEIIKLEMKPHSKTRRYIRITQSLADFIKTIDEALMIKPSDSIDDPLNMPNEIVCKNKLFGNELKPRDGKMKIVSTGKIVTYEFESDSTPQWIQTLYVTQLKKQP

SEQ ID NO: 1050 - protein, 907 aa, Leptospira inadai
MAKSIEEIRSIQNEFVVEYSILLKKIKKGEIDKKNDVYKVYQNTIKSSERLEQVLKERLGFQNVSKSYFNNPYSIAQLYNLISVDRSGFSKVCRSCQEENHWRSTLIDTDRGPQAQASKQVSDTGRPFDGQLAMLLDRIAFEIVKLKRIEIERLLSNKNSSKIEVVEIPLLIEENSFNFRYELAELKKLSKKKKDQLKKSVEEFDTKLNSKQERIKAASRELCPYTGKKISKGEIDHILPRSWTQKQFGTALNAEANLIYASREGNQSKGNREYGLNDLDEKYLNIIFGTKEVDSIQRNISDTIDRLDIERGTTRIVFDRLAPNERDCLRHALFIKSLRPKVFELLSGQLKARVNGTQLYLAKRIRSLLLKNQDFITKSLIIKVPSFSFYEPRTVDLPYMRKELAEKFPNLGKQNPQPTGSHIIDAAMVMAYAVETDSGNLSFGSKDKSEGFDSESLSRFLPSNIQFLSIKSKDKTDSKYPYKKPLFKDGVFGERFLPILIAEKGLRVGYTLENSLEVNSENPEEFFNVLKPYLLFKRKPIESNYQTLVAFAQKDKRGYIVLPVNKPKALESISQRKSDPHTSILKNILYTVSRESIPSLIFDKNTLIPEIKSNKVNWGDKLEKKFRIKIEIKLYGKKIADGFIRYPGKTEWEKLLLTEPLKGLVKNKTLTPKWFDSLENLAGLDDHFKDTSNPEAKHKRKSNHYALPVPKGPSGGFRIRRNSFDGYKVYQLYSVDGNSFHAFKIENGWTGKTLLLDIYQNSGNLHSLDYDYENTDISQTALFSKFYKIEFSKEETQKINSKGIKSLYVAPGSSSRQYIRVIFDKQTFSKFIKFQSKFWEFDLITPLPKDKAKDLIESILKIFPEDLRPKKPRNDIHIQNISHDSVQVEYIADGKTQGFGQYFINQN

SEQ ID NO: 1051 - protein, 418 aa, Leptospira inadai
MILKSPIAIDLGAKNTGIVYTTYQPNALPTEIHGATIISDNLKLSQVDRRAKRHQRRNYTRMKLARRLVYLIIRYHYRIPEQDLTPEVKTSLQSLLTRRGYTFQSIETEGNELGQAPWGEIEDYFPNVQDYEKSLPIQTVLYHFFSSENLELNKLVPSKEPETKEDKNILKYIREQKEAFESEQNNGARHRLKYFEEIKEDFPRKIKLMECLQKNKIEEKKFLNLIQNISNLQIKPLRAYFNDKDMKEKEIWEPRRLHTYIARWIRSWHIDPKNSSKRLIRQKLLSQLENGKLKIIRDTSIYSPSKDIISFLEEIDPKDTIPPYEDQNNRHPPRCQNLWLDGKILDRYFPGWEQSLWKLIRNEKNNPFEQLITKDFRTDDTISEGKSLSEQIQIYERSHSNIKLDVRAVILQRFLDRS

SEQ ID NO: 1052 - protein, 125 aa, Leptospira inadai
MSAYDRSANLDPWSLRLQGKAKKEIKTTESLSKTDLQKASDAYEKIKEILSESDTDQFIKLANRYYLEVADIKKGMWLPTAPERKHKEIPKSIAHEENQDISLFHKCNTKTGSKKRISQVSLEMF

SEQ ID NO: 1053 - protein, 1355 aa, Leuconostoc gelidum
MTYSIGLDIGTGSVGWAVIGDDYRLKRAKGKNLIGVRLFDSATTAAERRGYRTTRRRLSRRHWRLRLLNDIFASDLAEQDENFLPRLKYSWVNPDDEQNPQLNSDVANGALFGSSETDKAFHKNYPTIYHLRHELMTDTAKHDLREVYLAIHHIVKYRGNFLNTADKINAENSFNVDLFIAALDEYNEFLETPITSIKDAQLFSDKLTDINARNKSVRVENAMSETYDDKSKIFKAILTALVGNTANFQTIFDLSDLEKDEAKNFKFKLDLEDVETKLDVVRAKLSDEQNAFLEAVLIAYDGITLKMILGDYKSISQSMIESYKSHQRDWKYIKNNVRLNEQKIEPDKNSVKFFKLDPKKLIYPSNLAYLQVISSNEDEHRKGLDYFKTAIQDADILQRIENDTFLPRQRTKRNGVLPYQLHLAELEQIIKKQSKYYPFLANIYTQDNKTENKLIGLLKFRVPYYVGPLVEAEKVTGDGKNHWLIKKELQENTPITPFNFDDVVDKDKSGEQFIKRITGTDSYLIGEPTLPENSLLYQKYNVLQELNNVRNERHQRLPIKVKQDIFEHVFKIDKNVNAKKVMAYLKLNGYGDFQIAGLSDTRTGKFNSNLSSYNYFVDLLGREKTEKIREDRLEEIIEIQTVFEDKILVAKRLSNLDFLTPQEKSKLSAKHYTGWGRLSQKLLTTQFIKTALSEAGDIIPQSHSIIDLLYYTDKNLMEILNDKTFNVRNWLTEQNKGTESGNSLYDQIDALAGPKDIKRGITQVFSIIDDIKKAMGSNPETVYLEFARETQTSRLTNSRLNRVQEIYNSPELKTEFAYLAKKLEAETKESIHDDRLYLYYLQEGRDMYTGKEIPFDQISSNYDIDHIIPQAFTKDDSLDNRVLVNRATNARKSNSPTFTNDIIDNRKSWWQSLVKRGLMSKEKFERLTDKRKTFSENQTNHFIARQLVETRQIIKNVADLIKNNYDGTQAVAIRASLTGEMRRYLDWPKNRDMNDYHHAHDALMMATVGKYVDRRGFFDNGSVSDGAGNAYNLYTKDWLVAARVGTRNDSQRVNPYGFIVGSMNSKAVRQQVNKETGEIVWGNENLDYLRHVLSYKKILVTRRLSGSSGRLYAETLFSPNPKAKLIAQKANRSVALYGGFTKAESAYTALVEFNKKGDRSYKLIKVPMAIANRVNDKQITVTAYIASLNLRDFSRVVLEHLPLGTLIRESDGSEFYAASSEYKHNAKELWAPKEILRSSKKLDKATADNLIDIFDFLTNDKTISNFKFYEKDLLHLKNVRDKFVEASDEIKIKVLSDVIYELHNDAGWRDPFKHIQEKPAWTMLQVKGGIKLSEKAAIVYQSPTGLFETITIVGE

SEQ ID NO: 1054 - protein, 883 aa, Leuconostoc pseudomesenteroides
MIGVRLFEGADTAAERRGYRTTRRRLSRRRWRLRLLNDIFASELSKIDENFLPRLKYSWVNKNDTDNVHFGVGVFDNSEQEKAFYQDYPTIYHLRQKLMTDNRQHDLREVYLAIHHIVKYRGHFLNSGEISANSSFDAQKFLELLREFDNTFYPDAVKFLNLDQLDLPDKISSEISDSKISKSERVDRVLQHVQLANSGAKKILKAILNAVVGNSVDSVAMFSLSDLDKEEKKKINHPVTDSKPFKYSDKEVEAKLDELSNLLQDEQKIEFLSLLKLSFDGLTLKMLLGNAKSVSEAMVERYKVHKDDLKFIKENILNSFSKDKKKEFDKYYEAHLAEKDVDNVDKYFKKIIDDSIISKDKKIELLQKIDDHDFLPSQRSKINGAIPHQLHRNELDKIISQQSKYYPFLADSYTQNGKTETKLAGLVNFRVPYYVGPLVSKENADRNNPDGGQNHWVEFKENTSLSNLTPWNFNEIVDKDKSAAKFIERLTGMDTYLIGEPTLPQNSLLYQKYNVLQELNNIRVDNHKLDVKIKQDVFEHLFKTQNSVSAKDVKNYLIANGYAAPSIQITGLSDTNEKTFNSKLSSYNYLVDKLGRTFVESVKSDVLEKIIELQTVFEDKTVLLRQLSMISELTLAQANQLAEKHWTGWGRLSRKLLSSKVVDVNKITNSTFYPATSRQTIIDTLYHTQLNLMEIINNAEDLYGVRQWISEQNKSDSSDTNDVYDQIQELAGDKKIKRGITQSFRILDDIVKAMGGEPERVYLEFARENQQSGVSFSRKNLLSKLYENDSLKQTFKELKSQLESETKENLQNDRLYLYYLQQGRDMYSNDELNIDQLSSYDIDHIIPQAYTKDNSFDNRVLVSSKANRLKRMLLWYPVKLSKK

SEQ ID NO: 1055 - protein, 468 aa, Leuconostoc pseudomesenteroides
MKDQGFISKRKFENLTRRGDFSEQQKERFIARALVETRQIIVNVSSLIDSHFNHTKAVAVKSNMTTDMRHYTKVPKNRDINDYHHAHDALFVATVGQYIENKGFMKAGKLSDSVGNEYNRYTKKWIETARKNTNYGRVNPFGFVVGSMQTATRGKLDYETGELKVVKNNYWSKDDLDYLLKVVSYKKILVTTKLQDNKGAMYDANLISAKGSGKKKAQLQISKSKNIDLYGGFNKLQNEYSVLILNHDEYRWLSIPMYARNSSEQYLHDKYPDAKVILNHILVGQPILLSNSSDPQKSKFASLRIATGGDYHNNFEFVPSVDVKKILDNIYLNHSVTDDEYKKVFESLLATLHDKFVFGIHQVMYNKIFDNKYLFDKMPDEAKRNVINSLLKFMNISKNQLGAVGKIGGKVNGVLYGFKTETEKGTSAGQLISNGKMQPHDIFIFQSPTGIFERRVTVAELANVIKDE

SEQ ID NO: 1056 - protein, 1103 aa, Listeria innocua
LKLYPGEKSTGMFAQFISLIVGSKGNFQKPFDLIEKSDIECAKDSYEEDLESLLALIGDEYAELFVAAKNAYSAVVLSSIITVAETETNAKLSASMIERFDTHEEDLGELKAFIKLHLPKHYEEIFSNTEKHGYAGYIDGKTKQADFYKYMKTTLENIEGADYFIAKIEKENFLRKQRTFDNGAIPHQLHLEELEAILHQQAKYYPFLKENYDKIKSLVTFRIPYFVGPLANGQSEFAWLTRKADGEIRPWNIEEKVDFGKSAVDFIEKMTNKDTYLPKENVLPKHSLCYQKYLVYNELTKVRYINDQGKTSYFSGQEKEQIFNDLFKQKRKVKKKDLELFLRNMSHVESPTIEGLEDSFNSSYSTYHDLLKVGIKQEILDNPVNTEMLENIVKILTVFEDKRMIKEQLQQFSDVLDGVVLKKLERRHYTGWGRLSAKLLMGIRDKQSHLTILDYLMNDDGLNRNLMQLINDSNLSFKSIIEKEQVTTADKDIQSIVADLAGSPAIKKGILQSLKIVDELVSVMGYPPQTIVVEMARENQTTGKGKNNSRPRYKSLEKAIKEFGSQILKEHPTDNQELKNNRLYLYYLQNGKDMYTGQDLDIHNLSNYDIDHIVPQSFITDNSIDNLVLTSSAGNREKGNDVPPLEIVQKRKVFWEKLYQGNLMSKRKFDYLTKAERGGLTEADKARFIHRQLVETRQITKNVANILHQRFNYGKDDHGNTMKQVRIVTLKSALVSQFRKQFQLYKVRGVNDYHHAHDAYLNGVVANTLLKVYPQLEPEFVYGDYHQFDWFKANKATAKKQFYTNIMLFFAQKDRIIDENGEILWDKKYLDTVKKVMSYRQMNIVKKTEIQKGEFSKATIKPKGNSSKLIPRKTNWDPMKYGGLDSPNMAYAVVIEYAKGKNKLVFEKKIIRVTIMERKAFEKDEKAFLEEQGYRQPKVLAKLPKYTLYECEEGRRRMLASANEAQKGNQQVLPNHLVTLLHHAANCEVSDGKSLDYIESNREMFAELLAHVSEFAKRYTLAEANLNKINQLFEQNKEGDIKAIAQSFVDLMAFNAMGAPASFKFFETTIERKRYNNLKELLNSTIIYQSITGLYESRKRLDD

SEQ ID NO: 1057 - protein, 1337 aa, Listeria innocua
MKNMKKPYTIGLDIGTNSVGWAVLTDQYDLVKRKMKIAGDSEKKQIKKNFWGVRLFDEGQTAADRRMARTARRRIERRRNRISYLQGIFAEEMSKTDANFFCRLSDSFYVDNEKRNSRHPFFATIEEEVEYHKNYPTIYHLREELVNSSEKADLRLVYLALAHIIKYRGNFLIEGALDTQNTSVDGIYKQFIQTYNQVFASGIEDGSLKKLEDNKDVAKILVEKVTRKEKLERILKLYPGEKSAGMFAQFISLIVGSKGNFQKPFDLIEKSDIECAKDSYEEDLESLLALIGDEYAELFVAAKNAYSAVVLSSIITVAETETNAKLSASMIERFDTHEEDLGELKAFIKLHLPKHYEEIFSNTEKHGYAGYIDGKTKQADFYKYMKMTLENIEGADYFIAKIEKENFLRKQRTFDNGAIPHQLHLEELEAILHQQAKYYPFLKENYDKIKSLVTFRIPYFVGPLANGQSEFAWLTRKADGEIRPWNIEEKVDFGKSAVDFIEKMTNKDTYLPKENVLPKHSLCYQKYLVYNELTKVRYINDQGKTSYFSGQEKEQIFNDLFKQKRKVKKKDLELFLRNMSHVESPTIEGLEDSFNSSYSTYHDLLKVGIKQEILDNPVNTEMLENIVKILTVFEDKRMIKEQLQQFSDVLDGVVLKKLERRHYTGWGRLSAKLLMGIRDKQSHLTILDYLMNDDGLNRNLMQLINDSNLSFKSIIEKEQVTTADKDIQSIVADLAGSPAIKKGILQSLKIVDELVSVMGYPPQTIVVEMARENQTTGKGKNNSRPRYKSLEKAIKEFGSQILKEHPTDNQELRNNRLYLYYLQNGKDMYTGQDLDIHNLSNYDIDHIVPQSFITDNSIDNLVLTSSAGNREKGDDVPPLEIVRKRKVFWEKLYQGNLMSKRKFDYLTKAERGGLTEADKARFIHRQLVETRQITKNVANILHQRFNYEKDDHGNTMKQVRIVTLKSALVSQFRKQFQLYKVRDVNDYHHAHDAYLNGVVANTLLKVYPQLEPEFVYGDYHQFDWFKANKATAKKQFYTNIMLFFAQKDRIIDENGEILWDKKYLDTVKKVMSYRQMNIVKKTEIQKGEFSKATIKPKGNSSKLISRKTNWDPMKYGGLDSPNMAYAVVIEYAKGKNKLVFEKKIIRVTIMERKAFEKDEKAFLEEQGYRQPKVLAKLPKYTLYECEEGRRRMLASANEAQKGNQQVLPNHLVTLLHHVANCEVSDGKSLDYIESNREMFAELLAHVSEFAKRYTLAEANLNKINQLFEQNKEGDIKAIAQSFVDLMAFNAMGAPASFKFFETTIERKRYNNLKELLNSTIIYQSITGLYESRKRLDD

SEQ ID NO: 1058 - protein, 953 aa, Listeria ivanovii
MKKMLANIDGADYFIDQIEEENFLRKQRTFDNGTIPHQLHLEELEAILHQQAKYYPFLRKDYEKIRSLVTFRIPYFIGPLANGQSDFAWLTRKADGEIRPWNIEEKVDFGKSAIDFIEKMTNKDTYLPKENVLPKHSLCYQKYMVYNELTKIRYIDDQGKTHHFSGQEKQQIFNGLFKQQRKVKKKDLERFLYTINHIESPTIEGVEDAFNSSFATYHDLQKGGVTQEILDNPLNADMLEEIVKILTVFEDKRMIKEQLQSFSDVLDGTILKKLERRHYTGWGRLSAKLLTGIRDKHSHLTILDYLMNDDGLNRNLMQLINDSNLSFKSIIEKEQVSTADKGIQSIVAELAGSPAIKKGILQSLKIVDELVGIMGYPPQTIVVEMARENQTTGKGKNNSKPRFISLEKAIKEFGSQILKEHPTDNQCLKNDRLYLYYLQNGKDMYTGKELDIHNLSNYDIDHIIPQSFITDNSIDNRVLVSSTANREKGDNVPLLEVVRKRKAFWEKLYQAKLMSKRKFDYLTKAERGGLTEADKANFIQRQLVETRQITKNVANILYQRFNCKQDENGNEVEQVRIVTLKSTLVSQFRKQFQLYKVREVNDYHHAHDAYLNGVVANTLLKVYPQLEPEFVYGDYHQFDWFKANKATAKKQFYTNIMRFFAKENQIIDKNGEILWDNRYLDTIKKVLSYRQMNIVKKTEIQKGEFSNATVNPKGNSSKLISRKADWNPIKYGGFDGSNMAYSIVIEYEKRKKKTVIKKELIQINIMERVAFEKDQKAFLEEKGYYSPKVLTKIPKYTLYECENGRRRMLGSANEAQKGNQMVLPNHLMTLLYHAKNCEANDGESLAYIEMHREMFAELLAYISEFAKRYTLANDRLEKINMFFEQNKKGDIKVIAKSFDKLKVFNAFGAPRDFEFFETTIKRKRYYNIKELLNATIIYQSITGLYEARKRLED

SEQ ID NO: 1059 - protein, 232 aa, Listeria ivanovii
MMSKLILGLDIGISSVGWGVLDESTNEVVDAGVRLFEEATRNGNEDRRGFRSARRLKRRRQHRLERAKGLIENNGFSCTDINKFNPYQARYNAIFGEVTKDELAAALFHLVKRRGTTIDAPEEEVKDVENELSTKMQLEKNAKKLATKYDYICEIQLEKLKENKVVRDHENRFRTEDYVKEARAILENQQEYYPEVTNEFIESYMALIETRRMYYDGPGSEKSPTPYGQYFI

SEQ ID NO: 1060 - protein, 300 aa, Listeria monocytogenes
DDGLNRNLMQLINDSNLSFKSIIEKEQVSTTDKDLQSIVADLAGSPAIKKGILQSLKIVDELVSIMGYPPQTIVVEMARENQTTVKGKNNSRPRYKSLEKAIKEFGSQILKEHPTDNQELRNNRLYLYYLQNGKDMYTGQELDIHNLSNYDIDHIVPQSFITDNSIDNLVLTSSAGNREKGDDVPPLEIVRKRKVFWEKLFQGNLMSKRKFDYLTKAERGGLTEADKATFIHRQLVETRQITKNVANILHQRFNNETDNHGNNMEQVRIVMLKSALVSQFRKQFQLYKVREVNDYHHAHD

SEQ ID NO: 1061 - protein, 782 aa, Listeria monocytogenes
  misc_feature (722)..(722): Xaa can be any naturally occurring amino acid
IFNDLFKQKRKVKKKDLELFLRNINQIESPTIEGLEDSFNASYATYHDLLKVGMKQEILDNPLNTEMLEDIVKILTVFEDKRMIKEQLQQFSDVLDGVVLKKLERRHYTGWGRLSAKLLVGIRDKQSHLTILEYLMNDDGLNRNLMQLINDSNLSFKSIIEKEQVSTTDKDLQSIVADLAGSPAIKKGILQSLKIVDELVSIMGYPPQTIVVEMARENQTTVKGKNNSRPRYKSLEKAIKEFGSQILKEHPTDNQELKNNRLYLYYLQNGKDIYTGQELDIHNLSNYDIDHIVPQSFITDNSIDNLVLTSSAGNREKGDDVPPLEIVRKRKVFWEKLYQGNLMSKRKFDYLTKAERGGLTEADKARFIHRQLVETRQITKNVANILHQRFNNETDNHGNTMEQVRIVTLKSALVSQFRKQFQLYKVREVNDYHHAHDAYLNGVVANTLLKVYPQLEPEFVYGEYHQFDWFKANKATAKKQFYTNIMLFFAQKERIIDENGEILWDKKYLETIKKVLDYRQMNIVKKTEIQKGEFSKATIKPKGNSSKLIPRKENWDPMKYGGLDSPNMAYAVIIEHAKGKKKIVIEKKLIQINIMERKMFEKDEEAFLEEKGYRHPKVLTKLPKYTLYECEKGRRRMLASANEAQKGNQLVLSNHLVSLLYHAKNCEASDGKSLKYTEAHRETFSELLAQVSEFATRYTLADANLSKINNLFEQNKEGDIKXIAQSFVDLMVFNAMGAPASFKFFEATIDRKRYTNLKELLSSTIIYQSITGLYESRKRLDD

SEQ ID NO: 1062 - protein, 1334 aa, Listeria monocytogenes; identical to SEQ ID NO: 109

SEQ ID NO: 1063 - protein, 1334 aa, Listeria monocytogenes
MKNPYTIGLDIGTNSVGWAVLTDQYDLVKRKMKVAGNSDKKQIKKNFWGVRLFDDGQTAVDRRMNRTARRRIERRRNRISYLQEIFAVEMANIDANFFCRLNDSFYVDSEKRNSRHPFFATIEEEVAYHKNYRTIYHLREELVNSSEKADLRLVYLALAHIIKYRGNFLIEGALDTKNTSVDEVYKQFIQTYNQVFMSNIEEGALAKVEENTEVASILAGKFTRREKFERILRLYPGEKSTGMFAQFISLIVGNKGNFQKVFNLVEKTDIECAKDSYEEDLEALLAIIGDEYAELFVAAKNTYNAVVLSSIITVTATETNAKLSASMIERFDAHEKELGELKAFIKLHLPKQYQEIFNNAEIDGYAGYIDGKTKQVDFYKYLKTTLENVEGADYFITKIEEENFLRKQRTFDNGVIPHQLHLEELEAILHQQAKYYPFLREGYDKIKSLVTFRIPYFVGPLANGQSEFAWLTRKDDGEIRPWNIEEKVDFGKSAVDFIEKMTNKDTYLPKENVLPKHSLCYQKYMVYNELTKIRYIDDQGKTNYFSGREKQQIFNDLFKQKRKVKKKDLELFLRNINHIESPTIEGLEDSFNASYATYHDLLKVGLKQEILDNPLNTEILEDIVKILTVFEDKRMIKEQLEQFSDVLDGVVLKKLERRHYTGWGRLSAKLLVGIRDKQSHLTILDYLMNDDGLNRNLMQLINDSNLSFKSIIEKEQVSTTDKDLQSIVADLAGSPAIKKGILQSLKIVDELVSIMGYPPQTIVVEMARENQTTGKGKNNSKPRYKSLEKAIKDFGSQILKEHPTDNQELKNNRLYLYYLQNGKDIYTGQELDIHNLSNYDIDHIVPQSFITDNSIDNLVLTSSAGNREKGGDVPPLEIVRKRKVFWEKLYQGNLMSKRKFDYLTKAERGGLTEADKARFIHRQLVETRQITKNVANILHQRFNKETDNHGNTMEQVRIVTLKSALVSQFRKQFQLYKVREVNDYHHAHDAYLNGVVANTLLKVYPQLEPEFVYGEYHQFDWFKANKATAKKQFYTNIMLFFAQKERIIDENGEILWDKKYLETIKKVLDYRQINIVKKTEIQKGEFSKATIKPKGNSSKLIPRKENWDPMKYGGLDSPNMAYAVIIEHAKGKKKIVIEKKLIQINIMERKMFEKDEEAFLEEKGYHQPKVLTKLPKYTLYECEKGRRRMLSSANEAQKGNQLVLSNHLVSLLYHAKNCEASDGKSLKYIEAHRETFSELLAQVSEFATKYTLADANLSKINNLFEQNKEGDIKAIAQSFVDLMAFNAMGAPASFKFFEATIDRKRYTNLKELLSSTIIYQSITGLYESRKRLDD

SEQ ID NO: 1064 - protein, 1334 aa, Listeria monocytogenes
MKNPYTIGLDIGTNSVGWAVLTDQYDLVKRKMKVAGNSDKKQIKKNFWGVRLFDDGQTAVDRRMNRTARRRIERRRNRISYLQEIFAVEMANIDANFFCRLNDSFYVDSEKRNSRHPFFATIEEEVAYHKNYRTIYHLREELVNSSEKADLRLVYLALAHIIKYRGNFLIEGALDTKNTSVDEVYKQFIQTYNQVFMSNIEEGALAKVEENTEVASILAGKFTRREKFERILRLYPGEKSTGMFAQFISLIVGNKGNFQKVFNLVEKTDIECAKDSYEEDLEALLAIIGDEYAELFVAAKNTYNAVVLSSIITVTATETNAKLSASMIERFDAHEKELGELKAFIKLHLPKQYQEIFNNAEIDGYAGYIDGKTKQVDFYKYLKTTLENVEGADYFITKIEEENFLRKQRTFDNGVIPHQLHLEELEAILHQQAKYYPFLREGYDKIKSLVTFRIPYFVGPLANGQSEFAWLTRKDDGEIRPWNIEEKVDFGKSAVDFIEKMTNKDTYLPKENVLPKHSLCYQKYMVYNELTKIRYIDDQGKTNYFSGREKQQIFNDLFKQKRKVKKKDLELFLRNINHIESPTIEGLEDSFNASYATYHDLLKVGLKQEILDNPLNTEILEDIVKILTVFEDKRMIKEQLEQFSDVLDGVVLKKLERRHYTGWGRLSAKLLVGIRDKQSHLTILDYLMNDDGLNRNLMQLINDSNLSFKSIIEKEQVSTTDKDLQSIVADLAGSPAIKKGILQSLKIVDELVSIMGYPPQTIVVEMARENQTTGKGKNNSKPRYKSLEKAIKDFGSQILKEHPTDNQELKNNRLYLYYLQNGKDIYTGQELDIHNLSNYDIDHIVPQSFITDNSIDNLVLTSSAGNREKGGDVPPLEIVRKRKVFWEKLYQGNLMSKRKFDYLTKAERGGLTEADKARFIHRQLVETRQITKNVANILHQRFNKETDNHGNTMEQVRIVTLKSALVSQFRKQFQLYKVREVNDYHHAHDAYLNGVVANTLLKVYPQLEPEFVYGEYHQFDWFKANKATAKKQFYTNIMLFFAQKERIIDENGEILWDKKYLETIKKVLDYRQINIVKKTEIQKGEFSKATIKPKGNSSKLIPRKENWDPVKYGGLDSPNMAYAVIIEHAKGKKKIVIEKKLIQINIMERKMFEKDEEAFLEEKGYHQPKVLTKLPKYTLYECEKGRRRMLSSANEAQKGNQLVLSNHLVSLLYHAKNCEASDGKSLKYIEAHRETFSELLAQVSEFATKYTLADANLSKINNLFEQNKEGDIKAIAQSFVDLMAFNAMGAPASFKFFEATIDRKRYTNLKELLSSTIIYQSITGLYESRKRLDD

SEQ ID NO: 1065 - protein, 1099 aa, Listeria monocytogenes
MKNPYTIGLDIGTNSVGWAVLTDQYDLVKRKMKVAGNSDKKQIKKNFWGVRLFDDGQTAVDRRMNRTARRRIERRRNRISYLQEIFAVEMANIDANFFCRLNDSFYVDSEKRNSRHPFFATIEEEVAYHKNYRTIYHLREELVNSSEKADLRLVYLALAHIIKYRGNFLIEGALDTKNTSVDEVYKQFIQTYNQVFMSNIEEGALAKVEENTEVASILAGKFTRREKFERILRLYPGEKSTGMFAQFISLIVGNKGNFQKVFNLVEKTDIECAKDSYEEDLEALLAIIGDEYAELFVAAKNTYNAVVLSSIITVTATETNAKLSASMIERFDAHEKELGELKAFIKLHLPKQYQEIFNNAEIDGYAGYIDGKTKQVDFYKYLKTTLENVEGADYFITKIEEENFLRKQRTFDNGVIPHQLHLEELEAILHQQAKYYPFLREGYDKIKSLVTFRIPYFVGPLANGQSEFAWLTRKDDGEIRPWNIEEKVDFGKSAVDFIEKMTNKDTYLPKENVLPKHSLCYQKYMVYNELTKIRYIDDQGKTNYFSGREKQQIFNDLFKQKRKVKKKDLELFLRNINHIESPTIEGLEDSFNASYATYHDLLKVGLKQEILDNPLNTEILEDIVKILTVFEDKRMIKEQLEQFSDVLDGVVLKKLERRHYTGWGRLSAKLLVGIRDKQSHLTILDYLMNDDGLNRNLMQLINDSNLSFKSIIEKEQVSTTDKDLQSIVADLAGSPAIKKGILQSLKIVDELVSIMGYPPQTIVVEMARENQTTGKGKNNSKPRYKSLEKAIKDFGSQILKEHPTDNQELKNNRLYLYYLQNGKDIYTGQELDIHNLSNYDIDHIVPQSFITDNSIDNLVLTSSAGNREKGGDVPPLEIVRKRKVFWEKLYQGNLMSKRKFDYLTKAERGGLTEADKARFIHRQLVETRQITKNVANILHQRFNKETDNHGNTMEQVRIVTLKSALVSQFRKQFQLYKVREVNDYHHAHDAYLNGVVANTLLKVYPQLEPEFVYGEYHQFDWFKANKATAKKQFYTNIMLFFAQKERIIDENGEILWDKKYLETIKKVLDYRQINIVKKTEIQKGEFSKATIKPKGIPAN

SEQ ID NO: 1066 - protein, 1334 aa, Listeria monocytogenes
MKNPYTIGLDIGTNSVGWAVLTDQYDLVKRKMKVAGNSDKKQIKKNFWGVRLFDEGETAADRRMNRTARRRIERRRNRISYLQEIFALEMANIDANFFCRLNDSFYVDSEKRNSRHPFFATIEEEVAYHKNYRTIYHLREELVNSSEKADLRLVYLALAHIIKYRGNFLIEGALDTKNTSVDGVYKQFIQTYNQVFISNIEEGTLAKMEENTTVADILAGKFTRKEKLERILQLYPGEKSTGMFAQFISLIVGSKGNFQKVFDLVEKTDIECAKDSYEEDLEALLAIIGDEYAELFVAAKNTYNAVVLSSIITVTDTETNAKLSASMIERFDAHEKDLSELKAFIKLHLPKQYEEIFSNVAIDGYAGYIDGKTKQVDFYKYLKTLLENIEGADYFIAKIEEENFLRKQRTFDNGAIPHQLHLEELEAILHQQAKYYPFLKEAYDKIKSLVTFRIPYFVGPLANGQSDFAWLTRKADGEIRPWNIEEKVDFGKSAVDFIEKMTNKDTYLPKENVLPKHSLYYQKYMVYNELTKVRYIDDQGKTNYFSGQEKQQIFNDYFKQKRKVSKKDLEQFLRNMSHIESPTIEGLEDSFNSSYATYHDLLKVGIKQEVLENPLNTEMLEDIVKILTVFEDKRMIKEQLQQFSDVLDGAVLKKLERRHYTGWGRLSAKLLVGIRDKQSHLTILDYLMNDDGLNRNLMQLINDSNLSFKSIIEKEQVSTTDKDLQSIVADLAGSPAIKKGILQSLKIVDELVSIMGYPPQTIVVEMARENQTTVKGKNNSRPRYKSLEKAIKEFGSQILKEHPTDNQELRNNRLYLYYLQNGKDMYTGQELDIHNLSNYDIDHIVPQSFITDNSIDNLVLTSSAGNREKGDDVPPLEIVRKRKVFWEKLFQGNLMSKRKFDYLTKAERGGLTEADKATFIHRQLVETRQITKNVANILHQRFNNETDNHGNNMEQVRIVMLKSALVSQFRKQFQLYKVREVNDYHHAHDAYLNGVVANTLLKVYPQLEPEFVYGEYHQFDWFKANKATAKKQFYTNIMLFFAQKERIIDENGEILWDKKYLETIKKVLDYRQMNIVKKTEIQKGEFSKATIKPKGNSSKLIPRKENWDPMKYGGLDSPNMAYAVIIEHAKGKKKVVFEKKIIRITIMERKAFEKDEKSFLEKQGYRQPKVLTKLPKYTLYECENGRRRMLASANEAQKGNQQVLKGQLITLLHHAKNCEASDGKSLDYIESNREMFGELLAHVSEFAKRYTLADANLSKINQLFEQNKDNDIKVIAQSFVNLMAFNAMGAPASFKFFEATIERKRYTNLKELLSATIIYQSITGLYEARKRLDG

SEQ ID NO: 1067 - protein, 1334 aa, Listeria monocytogenes
MKNPYTIGLDIGTNSVGWAVLTNQYDLVKRKMKVAGNSDKKQIKKNFWGVRLFDDGQTAVDRRMNRTARRRIERRRNRISYLQEIFAVEMANIDANFFCRLNDSFYVDSEKRNSRHPFFATIEEEVAYHKNYRTIYHLREELVNSSEKADLRLVYLALAHIIKYRGNFLIEGALDTKNTSVDGVYEQFIQTYNQVFMSNIEEGTLAKVEENIEVANILAGKFTRREKFERILQLYPGEKSTGMFAQFISLIVGSKGNFQKVFDLIEKTDIECAKDSYEEDLEALLAIIGDEYAELFVAAKNTYNAVVLSSIITVTATETNAKLSASMIERFDAHEKDLGELKAFIKLHLPKQYQEIFNNAAIDGYAGYIDGKTKQVDFYKYLKTILENIEGADYFIAKIEEENFLRKQRTFDNGAIPHQLHLEELEAIIHQQAKYYPFLREDYEKIKSLVTFRIPYFVGPLAKGQSEFAWLTRKADGEIRPWNIEEKVDFGKSAVDFIEKMTNKDTYLPKENVLPKHSLCYQKYMVYNELTKVRYIDDQGKTNYFSGQEKQQIFNDLFKQKRKVKKKDLELFLRNINHIESPTIEGLEDSFNASYATYHDLLKVGMKQEILDNPLNTEMLEDIVKILTVFEDKPMIKEQLQQFSDVLDGGVLKKLERRHYTGWGRLSAKLLVGIREKQSHLTILDYLMNDDGLNRNLMQLINDSNLSFKSIIEKEQVSTTDKDLQSIVADLAGSPAIKKGILQSLKIVDELVSIMGYPPQTIVVEMARENQTTGKGKNNSKPRYKSLEKAIKEFGSKILKEHPTDNQELKNNRLYLYYLQNGKDMYTGQELDIHNLSNYDIDHIVPQSFITDNSIDNLVLTSSAGNREKGGDVPPLEIVRKRKVFWEKLYQGNLMSKRKFDYLTKAERGGLTDADKARFIHRQLVETRQITKNVANILHQRFNNETDNHGNTMEQVRIVTLKSALVSQFRKQFQLYKVREVNDYHHAHDAYLNGVVANTLLKVYPQLEPEFVYGEYHQFDWFKANKATAKKQFYTNIMLFFGQKERIIDENGEILWDKKYLETIKKVLDYRQMNIVKKTEIQKGEFSKATIKPKGNSSKLIPRKENWDPMKYGGLDSPNMAYAVIIEHAKGKKKLIFEKKIIRITIMERKMFEKDEEAFLEEKGYRHPKVLTKLPKYTLYECEKGRRRMLASANEAQKGNQLVLSNHLVSLLYHAKNCEASDGKSLKYIEAHRETFSELLAQVSEFATRYTLADANLSKINNLFEQNKEGDIQAIAQSFVDLMAFNAMGAPASFKFFEATIDRKRYTNLKELLSSTIIYQSITGLYESRKRLDD

SEQ ID NO: 1068 - protein, 874 aa, Listeria seeligeri; identical to SEQ ID NO: 175

SEQ ID NO: 1069 - protein, 1087 aa, Listeriaceae bacterium
MKKLVLGLDIGVASVGWGIIDAENGDVVDTGVRLFSSRDASENESRRTSRQSRRLSRRKKHRRERIKQLLLAHDMDICDIVNENPYELRVKGLNEKLEVSEIYVALTHLAKRRGVSYLDDVVEEGGTIKSEHLNKNMEEIKSGKMPCEIQLERFEKYGQVRGMIEINQDTEESSFLVNIFRTSDYIKEAKTILATQQKFHKQITNEFIDEYIHIMASKRDYFIGPGNEKSRTDYGVYRTNGDTWDNLFEILIGKCSVFPEETRAARSSYVAQEFNLLNDLNNLKISNLESGKLSASQKHDIVEKVKNSKKFGTKDLLKYIASVCECKIEDIGGCRVDKNRKPIMHTFENYRKVHNALNEAGVDLRLSETDYDELMKIMTLNSETLEIKKQCKEKLPQLTEDYLNVCLVLNKKGAFSGWHALSLKAMKLMMPELYGTSKNQMQIIHTMQLGKAYLKPLNQQKYLNSEAILEEIYNPIAARSIRQTIKVTNAILKKYGHLDSVIIEMPRDYQTSEDERKMIEKMQKENEKEKKAALKRAREEYPFPDEAFRNHKELATKLRLWYQQDQFCVYSGRKISVVDLVRNPNQFEIDHIIPQSVSLDDSLNNKVLCFSEENQKKGQQTPFYYHKGKSGNWTYEQYKLFVEKLFDKKKISNKKRELLLFEEDINKWDVRRGFIARNLVDTRYASRVILNSYQQYFGNHEMGTKVKVVRGKFTSQLRKKWRIFKDRNESHSHHAIDALIVAATANLRLWKKNTLGVSDEGKVYDKETGEILPFEKLTESEYNEMMNKEPYLNFKTKLQNIETKVKYSYRVSKKVNRKISDATIYSTRERDGIDYIVGKIKNIYDVKTYKDQFLKRYKKNKEQFLMYQHDPQTFAILENIMATYQDAENPFLAYKKEYGVIRKYSKKGGGSPVTSLKFIDKVLGQKIDLTAKNQAALPKNKKVVLQSITPYRADVYYDEIDKRYHLIGVKYSLFSFSKQGYVINPIAYQKLLEKEQIHSEMKFCFSLYREDIIEFGEDPDSLTRYRFWSKNESGKNKIEVKPIEKPNFEKQTVLTITKKIKILNKYQTDVLGNSFKAQEEKDPRNIE

SEQ ID NO: 1070 - protein, 1345 aa, Unknown
  Marinilabilia sp. AK2
MKKILGLDLGTTSIGWAFIKEPEKDVVGSEIVDMGVRIVALSSDEENDFAKGNTISINADRTLKRGARRNLQRFKLRRDALLEIFKEMKLIPSNFKYAEDGPSSTFSTLKLRDKAAKEKIELDDLVKVLLQINKKRGYRSSRKAKSEEDDGSAIDSMGIAKELYENDLTPGQWVFEALQKGRKNVPDFYRSDLQEEFKKIVNYQSEFYPDVLNSSFVEDWMGKASTPTKQYFNKKGVHLAENKGKREERRLQEYNWRAVAVNSKIDLSEIALILSQINSQISNSSGYLGAISDRSKELYFKNQTVGQYLYQQIKINPHTRLKGQVFYRQDYLDEFEKIWSVQSGFHPQLNDALKKEIRDITIFFQRRLKSQKHLISNCEFEDYHKVVPKSHPIFQEFRIWQNLNNLTLIKKDNLNEKSELALEDKIALANELAFKREQSVKDALNILGLKSSEWEFNFTKIEGNRTNHAFFEAFAKIIEIEDGEPLDLGNLKADDILDQFSEAFLRIGIDPGLLQVNNDIEGPNYEKQPYIQFWHLLYSSEDDQKLKQNLIKKFGFKPDHAKILASISLQDDHASLSSRAIKKILPHLQSGLIYDKACTYAGYNHSSSFTKEENEKRELSSELDLLKKNSLRNPVVEKILNQMINVVNAILKDPNLGKPDEIRVEMARELKANAEQRKNMTSNIASATRDHEKYREILKKEFGLKRVTKNDLLRYKLWLETDGISLYTGKPIEASKLFSKEYDIEHIIPKTRLFDDSFSNKTICERQLNIDKANVTAFSFLQNKLSGDEFEQYQSRVKSLFGKLSKAKIQKLLMANDKIPEDFIARQLQETRYISKKAKEILFEITRRVSVTTGTITDKLREDWGLVEIMKELNWEKYDKLGLTYTIEGKHGERLNKIKDWSKRNDHRHHAMDALTVALTKPAYIQYLNNLNAKELNGKKSTEIFAIEQKYLKRENGKLCFIPPVENIRTEAKKHLSKVLISYKAKNKVVTINKNRTNKKAGFNEQIALTPRGQLHKETVYGKAFHYSTKFEKIGASFDVQKINAVAKKEEREALLKRLAENGDDPKKAFTGKNSLSKMPIYLDLKRNIKLPEKVKTVVLEQNYTIRKNIDPDLKLDKVIDVGVKRILENRLKEFGGNAKLALSNLDENPIWLNKEKGITIKRVKISGVSNVESLHVKKDHFGEPILDQVGNEIPVDFVSTGNNHHVAIYEDEKGNLQEEVVSFFEAVVRQNQGLPIINKNHSLGWKFLFTLKQNEYFVFPSDDFDPTDVDLMDEENYHLISPNLFRVQKFTTKDYFFRHHLETTVEDKSELKGVSFKRLGLPGLNCIKKIRINHLGKIIQVGEY

SEQ ID NO: 1071 - protein, 1091 aa, Mobiluncus mulieris
MDSRKYRVGIDVGTNSVGFAAVEEDDSGSPTRFLNTMVVIHDSGVDSEQKKYAITRLASAGTARRTRRLYRTRRQRLRELDDFISNELGYPLVNLENFADPYEPWKVRADLATTKLPNDELPEAMSIALRHMARHRGWRSPYQRVEALHLHAEISKEFAALKERVVEKTGDVFSDDATPAEVLVDLMGRQKVRGADGVLSGKLRQSDNANELRKIASVQGIDDETLNRIIDRVFSSKSPKGKASERVGMDALPGQGSKPRALKAMPSFQKFRVVSVICNLRIKDSGGDARPLSMEEKEKLIDYLMSSTTDDHVTWTDVADLLHVKRSQLQGTAKEGFDGERPYTRPPVNSTWSKIKDSKIKSLVALWKTGDVDVQSAIVEALSNASVLEDSRPGADIVVAYLESLDDKELESLDKVGLPAGRASYSEDSLERLTERMLRDDCDLFEARKREFNVADDWKPPADPIYAPVGNPGVDRVLKIVNRLLMAAEREWGAPTQINIEHVRSGFSSELMQREFERENERRRAQNEEAVKAILTEKGGNSRVSKYDITRYYAVKRQHCQCLYCGTPITFSDCELDHIVPRKGVGSTNTRVNLAAACRSCNRDKSNLPFAVWAGKASNFDVSIDDAVSRVKQWQRSQNEGVREFRAFQNEVISRLLKTTEDPEIDSRSLESVAWMARELHHRVEYYFQSKGAQTQVSVYRGAVTAQARKSSGLEDKVKMIGGGGKTRLDRRHHAMDAATIALMTPGISTTLSEKNNLRDAQKFTGQSETWKDYCGRTETARKHFAVWKSNMERLTDLFNDKLENDAIPVVQPLRLRLSNSKAHDDGIGKLDSKKLGSVWSLADIDRAATPQIWTALTRCDDFDPTKGLPENANRVIRAQGVKYESEDNIPVFPSNVAAIAVRDGYAEIGSTIHHARIYRIDDGKKTFYSMIRVFAVDLLKHQAEDLFTVKLPPSAISIRTCEDSLRRALSNGTAEYLGWLVPGDEIIVDTSDKAFHTGQIGDLLRNFPVNSFRLTGFPSNSRLRLKPVLLAGEGLRDDAEDSIKKILLGQGWRPAINVLFSKGKPRIVRRNSLGIERPSSNNGLPFSWEA

SEQ ID NO: 1072 - protein, 1233 aa, Mycoplasma canis
MEKKRKVTLGFDLGIASIGWAIVDSETNQVYKLGSRLFDAPDTNLERRTQRGTRRLLRRRKYRNQKFYNLVKRTEVFGLSSREAIENRFRELSIKYPNIIELKTKALSQEVCPDEIAWILHDYLKNRGYFYDEKETKEDFDQQTVESMPSYKLNEFYKKYGYFKGALSQPTESEMKDNKDLKEAFFFDFSNKEWLKEINYFFNVQKNILSETFIEEFKKIFSFTRDISKGPGSDNMPSPYGIFGEFGDNGQGGRYEHIWDKNIGKCSIFTNEQRAPKYLPSALIFNFLNELANIRLYSTDKKNIQPLWKLSSIDKLNILLNLFNLPISEKKKKLTNANINDIVKKESTKSIMLSVEDIDMIKDEWAGKEPNVYGVGLSGLNIEESAKENKFKFQDLKILNVLINLLDNVGIKFEFKDRNDIIKNLELLDNLYLFLIYQKESNNKDSSIDLFIAKNELLNIENLKLKLKEFLLGAGNEFENHNSKTHSLSKKAIDAILPKLLDNNEGWNLEAIKNYDEEIKSQIEDNSSLMAKQDKKYLNDNFLKDAILPPNVKVTFQQAILIFNKIIQKFSKDFEIDKVVIELAREMTQDQENDALKGIAKAQKSKKSLVEERLEANNIDKSVFNDKYEKLIYKIFLWISQDFKDPYTGAQISTNEIVNNKVEIDHIIPYSLCFDDSSANKVLVHKQSNQEKSNSLPYEYIKQGHSGWNWDEFTKYVKRVFVNNVDSILSKKERLKKSENLLTTSYDGYDKLGFLARNLNDTRYATILFRDQLNNYAEHHLIDNKKMFKVIAMNGAVTSFIRKNMSYDNKLRLKDRSDFSHHAYDAAIIALFSNKTKTLYNLIDPSLNGIISKRSEGYWVIEDRYTGEIKELKKEDWTSIKNNVQARKIAKEIEEYLIDLDDEVFFSRKTKRKTNRQLYNETIYGIAAKTDEDGITNYYKKEKFSILDDKDIYLRLLREREKFVINQSNPEVIDQIIEIIESYGKENNIPSRDEAINIKYTKNKINYNLYLKQYMRSLTKSLDQFSEEFINQMIANKTFVLYNPTKNTTRKIKFLRLVNDVKINDIRKNQVINKFNGKNNEPKAFYENINSLGAIVFKNSANNFKTLSINTQIAIFGDKNWDIEDFKTYNMEKIEKYKEIYGIDKTYNFHSFIFPGTILLDKQNKEFYYISSIQTVRDIIEIKFLNKIEFKDENKNPDTSKTPKRLMFGIKSIMNNYEQVDISPFGINKKIFE

SEQ ID NO: 1073 - protein, 1233 aa, Mycoplasma canis
MEKKRKVTLGFDLGIASVGWAIVDSETNQVYKLGSRLFDAPDTNLERRTQRGTRRLLRRRKYRNQKFYNLVKRTEVFGLSSREAIENRFRELSIKYPNIIELKTKALSQEVCPDEIAWILHDYLKNRGYFYDEKETKEDFDQQTIESMPSYKLNEFYKKYGYFKGALSQPTESEMKDNKDLKEAFFFDFSNKEWLKEINYFFNVQKNILSETFIEEFKKIFSFTRDISKGPGSDNMPSPYGIFGEFGDNGQGGRYEHIWDKNIGKCSIFTNEQRAPKYLPSALIFNFLNELANIRLYSTDKKNIQPLWKLSSIDKLNILLNLFNLPISEKKKKLTSANINDIVKKESTKSIMLSVEDIDMIKDEWAGKEPNVYGVGLSGLNIEESAKENKFKFQDLKILNVLINLLDNVGIKFEFKDRNDIIKNLELLDNLYLFLIYQKESNNKDSSIDLFIAKNESLNIENLKLKLKEFLLGAGNEFENHNSKTHSLSKKAIDAILPKLLDNNEGWNLEAIKNYDEEIKSQIEDNSFLMAKQDKKYLNDNFLKDAILPPNVKVTFQQAILIFNKIIQKFSKDFEIDKVVIELAREMTQDQENDALKGIAKAQKSKKSLVEERLEANNIDKSVFNEKYEKLIYKIFLWISQDFKDPYTGAKISANEIVDNKVEIDHIIPYSLCFDDSSANKVLVHKQSNQEKSNSLPYEYIKQGHSGWNWDEFTKYVKRVFVNNVDSILSKKERLKKSENLLTTSYDGYDKLGFLARNLNDTRYATILFRDQLNNYAEHHLIDDKKMFKVIAMNGAVTSFIRKNMSYDNKLRLKNRNDFSHHAYDAAIIALFSNKTKTLYNLIDPSLNGIISKRSEGYWVIEDRYTGEIKELKKEDWTSIKNNVQARKIAKEIEEYLIDLDDEVFFSRKTKRKTNRQLYNETIYGIAAKTDEDGITNYYKKEKLSILDDKDIYLRLLREREKFVINQSNPEVIDQIIEIIESYGKENNIPSRDEAINIKYTKNKINYNLYLKQYMRSLTKSLDQFSEEFINQMIANKTFVLYNPTKNTTRKIKFLRLVNDVKINDIRKNQVINKFNGKNNEPKAFYENINSLGAIVFKNSANNFKTLSINTQIAIFGDKNWDIEDFKTYNMEKIEKYKEIYGIDKTYNFHSFIFPGTILLDKQNKEFYYISSIQTVRDIIEIKFLNKIEFKDENKNQDTSKTPKRLMFGIKSIMNNYEQVDISPFGINKKIFE

SEQ ID NO: 1074 - protein, 1233 aa, Mycoplasma canis; identical to SEQ ID NO: 242

SEQ ID NO: 1075 - protein, 1233 aa, Mycoplasma canis
MEKKRKVTLGFDLGIASVGWAIVDSETNQVYKLGSRLFDAPDTNLERRTQRGTRRLLRRRKYRNQKFYNLVKRTEVFGLSSREAIENRFRELSIKYPNIIELKTKALSQEVCPDEIAWILHDYLKNRGYFYDEKETKEDFDQQTVESMPSYKLNEFYKKYGYFKGALSQPTESEMKDNKDLKEAFFFDFSNKEWLKEINYFFNVQKNILSETFIEEFKKIFSFTRDISKGPGSDNMPSPYGIFGEFGDNGQGGRYEHIWDKNIGKCSIFTNEQRAPKYLPSALIFNFLNELANIRLYSTDKKNIQPLWKLSSVDKLNILLNLFNLPISEKKKKLTSTNINDIVKKESIKSIMISVEDIDMIKDEWAGKEPNVYGVGLSGLNIEENAKENKFKFQDLKILNVLINLLDNVGIKFEFKDRNDIIKNLELLDNLYLFLIYQKESNNKDSSIDLFIAKNKSLNIENLKLKLKEFLLGAGNEFENHNSKSHSLSKKAIDAILPKLLDNNEGWNLEAIKNYDEEIKSQIEDNSSLMAKQDKKYLNDNFLKDAILPPNVKVTFQQAILIFNKIIQKFSKDFEIDKVVIELAREMTQDQENDALKGMAKAQKSKKSLVEERLEANNIDKSVFNDKYEKLIYKIFLWISQDFKDPYTGAQISVNEIVNNKVEIDHIIPYSLCFDDSSANKVLVHKQSNQEKSNSLPYEYIKQGHSGWNWDEFTKYVKRVFVNNVDSILSKKERLKKSENLLTTSYDGYDKLGFLARNLNDTRYATILFRDQLNNYAEHHLIDNKKMFKVIAMNGAVTSFIRKNMSYDNKLRLKDRSDFSHHAYDAAIIALFSNKTKTLYNLIDPSLNGIISKRSEGYWVIEDRYTGEIKELKKEDWTSIKNNVQARKIAKEIEEYLIDLDDEVFFSRKTKRKTNRQLYNETIYGIAAKTDEDGITNYYKKEKFSILDDKDIYLRLLREREKFVINQSNPEVIDQIIEIIESYGKENNIPSRDEAINIKYTKNKINYNLYLKQYMRSLTKSLDKFSEEFINQMIANKTFVLYNPTKNTTRKIKFLRLVNDVKINDIRKNQVINKFNGKNNEPKAFYENINSLGAIVFKNSANNFKTLSINTQIAIFGDKNWDIEDFKTYNMEKIEKYKEIYGIDKTYNFHSFIFPGTILLDKQNKEFYYISSIQTVRDIIEIKFLNKIEFKDENKNQDTSKTPKRLMFGIKSIMNNYEQVDISPFGINKKIFE

SEQ ID NO: 1076 - protein, 1233 aa, Mycoplasma canis
MEKKRKVTLGFDLGIASVGWAIVDSETNQVYKLGSRLFDAPDTNLERRTQRGTRRLLRRRKYRNQKFYNLVKRTEVFGLSSREAIENRFRELSIKYPNIIELKTKALSQEVCPDEIAWILHDYLKNRGYFYDEKETKEDFDQQTVESMPSYKLNEFYKKYGYFKGALSQPTESEMKDNKDLKEAFFFDFSNKEWLKEINYFFNVQKNILSETFIEEFKKIFSFTRDISKGPGSDNMPSPYGIFGEFGDNGQGGRYEHIWDKNIGKCSIFTNEQRAPKYLPSALIFNFLNELANIRLYSTDKKNIQPLWKLSSVDKLNILLNLFNLPISEKKKKLTSTNINDIVKKESIKSIMLSVEDIDMIKYEWAGKEPNVYGVGLSGLNIEESAKENKFKFQDLKILNVLINLLDNVGIKFEFKDRNDIIKNLELLDNLYLFLIYQKESNNKDSSIDLFIAKNKSLNIENLKLKLKEFLLGAGNEFENHNSKTHSLSKKAIDAILPKLLDNNEGWNLEAIKNYDEEIKSQIEDNSSLMAKQDKKYLNDNFLKDAILPPNVKVTFQQAILIFNKIIQKFSKDFEIDKVVIELAREMTQDQENDALKGIAKAQKSKKSLVEERLEANNIDKSVFDDKYEKLIYKIFLWISQDFKDPYTGAKISANEIVNNKVEIDHIIPYSLCFDDSSANKVLVHKQSNQEKSNSLPYEYIKQGHSGWNWDEFTKYVKRVFVNNVDSILSKKERLKKSENLLTTSYDGYDKLGFLARNLNDTRYATILFRDQLNNYAEHHLIDNKKMFKVIAMNGAVTSFIRKNMSYDNKLRLKDRSDFSHHAYDAAIIALFSNKTKTLYNLIDPSLNGIISKRSEGYWVIEDRYTGEIKELKKEDWTSIKNNVQARKIAKEIEEYLIDLDDEVFFSRKTKRKTNRQLYNETIYGIAAKTDEDGITNYYKKEKFSILDDKDIYLRLLREREKFVINQSNPEVIDQIIEIIESYGKENNIPSRDEAINIKYTKNKINYNLYLKQYMRSLTKSLDQFSEEFINQMIANKTFVLYNPTKNTTRKIKFLRLVNDVKINDIRKNQVINKFNGKNNEPKAFYENINSLGAIVFKNSANNFKTLSINTQIAIFGDKNWDIEDFKTYNMEKIEKYKEIYGIDKTYNFHSFIFPGTILLDKQNKEFYYISSIQTVRDIIEIKFLNKIEFKDENKNQDTSKTPKRLMFGIKSIMNNYEQVDISPFGINKKIFE

SEQ ID NO: 1077 - protein, 1239 aa, Mycoplasma cynos
MEEKRKVTLGFDLGVASVGWAIVDSETNEVYKLGSRLFDIPDTNIDRRAKRGSRRLVRRRSYRNQKFYNLIKRTKTFGFLDKEAIEKEFVLLSIKYPNIIELKVKGLQEEVSKSEAVWILHDYLKNRGYFYDDKEEKDDLENPSIESMPSYKLYEFYKEYGYFKGALSSPTESEKNKDSDLEKAIFFNFSNKEWTKEINHFFKIQKNIFSEDFKAKFMEFFSFIRDISKGPGSENMPSQYSIFGKYGDDGMGGKYQHIWDKNIGKCSIFKDKVRAPKYLPSALFFNLLNELSNIRLYSVDKREKSVLWRLSSKDKINIILNILQIILFKNDGKISNLDINKIVKNESIKSIILNEIDLDLIKDMWFEKEPNVYGIGLSGLNIEENKKENRFKFQDLKIFSVFIDLLKKSNINIEFNNEKDIIHNLKLLDELYFFLITQKYSRDKYGSIKKFILNNKSFNIDNLDEKLNIFLSISDDEFDNHNSKTHSLSKEAIYFIFPKLLHNNEGWNLEAIKNYDIDVREEISKHSFGIKKQDKKYLDDAFLDDAILPPSVKVTIKQSILIFNKIIKKFSNKFQIDNVVIELAREMTQEKEMDAQKSLNRLKKSRKKIIEERLNANNIDSKMFRDKTGEISPNYIYKIYLWISQNFKDPYTGENISANDILKNNVEIDHIIPYSLCFDDSSSNKVLVFKHSNQSKGNFLPFDMISTFSENSVWNWKEYTQYVEKTFKTNLESILDKKERVKKADNLLTSSYDGYDKLGFLARNLNDTRYATILFRDQLINYSENHLIDSKKMFKVIAMNGGVTSFIRKNMSFDSGLKVKDRSIFSHHAYDAAIIALFSNKTKILYNLINPSLDGIISKRSEGYWVLEDRLTGEIRKLNYNDWQSIKNNVEVKKIAREIESHLSNLDNVVMFSRKSKRKTNKELYNETLYGIATRIDENGIKNYYKKEKFNILEDENIYLRLLNERENFIINRSNPEVIDAIIEIFETIDKNKIPARDVAKNIKYTDNKIKYNLYLKDYMRKLVDEFPDKFRKDFIEQMIAKKIFILFNPIKNTTRKIKSLRSINNNKIEDIRKKQVLEKFNTAKNEPRSFYESLNSLGAIIFKNNLNIYKKMSISSQIATFGDKNWKIDDINTYNKEKLNKYKEIYGIDETYDFYSFIFPGTILLDEKNKEFLYISSIQTLKDKIELKFLDRIEFEKKNVNSNLKPKIKREIISTKKLMSDYKIIKISPLGINKKIFE

SEQ ID NO: 1078 - protein, 1269 aa, Mycoplasma gallisepticum
MNNSIKSKPEVTIGLDLGVGSVGWAIVDNETNIIHHLGSRLFSQAKTAEDRRSFRGARRLIRRRKYKLKRFINLIWKYNSYFGFKNKEDILNNYQEQQKLHNTVLNLKLEALNAKIDPKALSWILHDYLKNRGHFYEDNRDFNVYPTEELANYFGEYGYYKGIIDSKEDNDDKLEEGLTKYKFSNQHWLEEIKKVLSNQTGLPEKFKEEYESLFSYVRNYSEGPGSINSVSPYGIYHLDEKEGKVVQKYNNIWDKTIGKCSIFPDEYRAPKNSPIAMIFNEINELSTIRSYSIYLTGWFINQEFKKAYLNKLLDLLIKTNSEKPIDARQFKKLREETIAESIGKETLKDVEREEKLEKEDHKWKLKGLKLNTNGKIQYNDLSSLAKFVHKLKQHLKLDFLLEDQYTTLDKINFLQSLFVYLGKHLRYSNRVDSANLKEFSDSNKLFERVLQEQKDDLFKLFEQTDKDDEKILAQTHSLSTKAMLLAITRMTNLDNDEDNQKNNDKGWNFEAIKNFDQKFIDITKKNNNLSLKQDKRYLDDRFINDAILSPGVKRILREATKVFNAILKQFSEEYDVTKVVIELARELSEEKELENTKNYEKLIKKNSDKISERLEALDIAEDKIEDILKSPTKSYKVLLWLQQDHIDPYSQKEIAFEDILTKTEKTEIDHIIPYSISFDDSSSNKLLVLAESNQAKSNQTPYEFITSGNAGIKWEDYEAYCRKFKDGDTSLLDSTQRSKKFAKMMKTDTSSKYDIGFLARNLNDTRYATIVFRDALKDYANNHLVEDKPMFKVVCINGGVTSFLRKNFDKSWYAKKDRDKNIHHAVDASIISIFSNETKTLFNQLTQFADYKLFKNTDGSWKKIDPKTGVVTEVTDENWKQIRVRNQVSEIAKVINKCIQDSNIERKARYSRKIENKTNISLFNDTVYSAKKVGYEDQIKRKNLKTLDIHESAEENKNSKVKKQFVYRKLVNVSLLNNDKLADLFAEKEDILMYRANPWVINLAEQIFNEYTENKKIKSQNVFEKYMLDLTKEFPEKFSEAFVKSMLRNKTAIIYNVEKKVVHRIKRLKILSSELKENKLSNVIIRSKNESGTKLSYQDTINSIALMIMRSIDPTAKKQYIRVPLNTLNLHLGDQDFDLHNIDAYLKKPKFVKYLKANEIGDEYKPWRVLTSGTLLIHKKDKKLMYISSFQNLKDVIEIKNLIETEYKENDDSDPKKKKKANRFLMTLSTILNDYILLDAKDNFDILGLSKNRIDEILNSKLGLDKITK

SEQ ID NO: 1079 - protein, 1224 aa, Mycoplasma gallisepticum
MNNSIKSKPEVTIGLDLGVGSVGWAIVDNETNIIHHLGSRLFSQAKTAEDRRSFRGARRLIRRRKYKLKRFINLIWKYNSYFGFKNKEDILNNYQEQQKLHNTVLNLKLEALNAKIDPKALSWILHDYLKNRGHFYEDNRDFNVYPTEELANYFGEYGYYKGIIDSKEDNDDKLEEGLTKYKFSNQHWLEEIKKVLSNQTGLPEKFKEEYESLFSYVRNYSEGPGSINSVSPYGIYHLDEKEGKVVQKYNNIWDKTIGKCSIFPDEYRAPKNSPIAMIFNEINELSTIRSYSIYLTGWFINQEFKKAYLNKLLDLLIKTNSEKPIDARQFKKLREETIAESIGKETLKDVEREEKLEKEDHKWKLKGLKLNTNGKIQYNDLSSLAKFVHKLKQHLKLDFLLEDQYTTLDKINFLQSLFVYLGKHLRYSNRVDSANLKEFSDSNKLFERVLQEQKDDLFKLFEQTDKDDEKILAQTHSLSTKAMLLAITRMTNLDNDEDNQKNNDKGWNFEAIKNFDQKFIDITKKNNNLSLKQDKRYLDDRFINDAILSPGVKRILREATKVFNAILKQFSEEYDVTKVVIELARELSEEKELENTKNYEKLIKKNSDKISERLEALDIAEDKIEDILKSPTKSYKVLLWLQQDHIDPYSQKEIAFEDILTKTEKTEIDHIIPYSISFDDSSSNKLLVLAESNQAKSNQTPYEFITSGNAGIKWEDYEAYCRKFKDGDTSLLDSTQRSKKFAKMMKTDTSSKYDIGFLARNLNDTRYATIVFRDALKDYANNHLVEDKPMFKVVCINGGVTSFLRKNFDKSWYAKKDRDKNIHHAVDASIISIFSNETKTLFNQLTQFADYKLFKNTDGSWKKIDPKTGVVTEVTDENWKQIRVRNQVSEIAKVINKCIQDSNIERKARYSRKIENKTNISLFNDTVYSAKKVGYEDQIKRKNLKTLDIHESAEENKNSKVKKQFVYRKLVNVSLLNNDKLADLFAEKEDILMYRANPWVINLAEQIFNEYTENKKIKSQNVFEKYMLDLTKEFPEKFSEAFVKSMLRNKTAIIYNVEKKVVHRIKRLKILSSELKENKLSNVIIRSKNESGTKLSYQDTINSIALMIMRSIDPTAKKQYIRVPLNTLNLHLGDQDFDLHNIDAYLKKPKFVKYLKANEIGDEYKPWRVLTSGTLLIHKKDKKLMYISSFQNLKDVIEIKNLIETEYKENDDSDPKKRRKQIGS

SEQ ID NO: 1080 - protein, 1269 aa, Mycoplasma gallisepticum; identical to SEQ ID NO: 133

SEQ ID NO: 1081 - protein, 226 aa, Mycoplasma iowae
MSNKKKITIGLDIGVSSVGWSILREDNVLIDYGSRLFPDAANAKDGKLENEARRSHRSMRRRIRRIKTRKNDLIKLLIKYNIISDQDELAKILEQGIVNETGNVPIVEIKYKGLKEKLSKEELLICLYHYIHKRGYFYITEEDLKENGENINRLPTEIQYDFYMKNGYYIGNEDNQKFSNLIWVKEIEKFLSKQSLDSNFVDEYISLFRRVRDYSDGPGSEKSPTP

SEQ ID NO: 1082 - protein, 1304 aa, Mycoplasma synoviae
MLNNVQNLWKYLLLLIFDKKIIFLFKIKVILIRRYMENNNKEKIVIGFDLGVASVGWSIVNAETKEVIDLGVRLFSEPEKADYRRAKRTTRRLLRRKKFKREKFHKLILKNAEIFGLQSRNEILNVYKDQSSKYRNILKLKINALKEEIKPSELVWILRDYLQNRGYFYKNEKLTDEFVSNSFPSKKLHEHYEKYGFFRGSVKLDNKLDNKKDKAKEKDEEEESDAKKESEELIFSNKQWINEIVKVFENQSYLTESFKEEYLKLFNYVRPFNKGPGSKNSRTAYGVFSTDIDPETNKFKDYSNIWDKTIGKCSLFEEEIRAPKNLPSALIFNLQNEICTIKNEFTEFKNWWLNAEQKSEILKFVFTELFNWKDKKYSDKKFNKNLQDKIKKYLLNFALENFNLNEEILKNRDLENDTVLGLKGVKYYEKSNATADAALEFSSLKPLYVFIKFLKEKKLDLNYLLGLENTEILYFLDSIYLAISYSSDLKERNEWFKKLLKELYPKIKNNNLEIIENVEDIFEITDQEKFESFSKTHSLSREAFNHIIPLLLSNNEGKNYESLKHSNEELKKRTEKAELKAQQNQKYLKDNFLKEALVPLSVKTSVLQAIKIFNQIIKNFGKKYEISQVVIEMARELTKPNLEKLLNNATNSNIKILKEKLDQTEKFDDFTKKKFIDKIENSVVFRNKLFLWFEQDRKDPYTQLDIKINEIEDETEIDHVIPYSKSADDSWFNKLLVKKSTNQLKKNKTVWEYYQNESDPEAKWNKFVAWAKRIYLVQKSDKESKDNSEKNSIFKNKKPNLKFKNITKKLFDPYKDLGFLARNLNDTRYATKVFRDQLNNYSKHHSKDDENKLFKVVCMNGSITSFLRKSMWRKNEEQVYRFNFWKKDRDQFFHHAVDASIIAIFSLLTKTLYNKLRVYESYDVQRREDGVYLINKETGEVKKADKDYWKDQHNFLKIRENAIEIKNVLNNVDFQNQVRYSRKANTKLNTQLFNETLYGVKEFENNFYKLEKVNLFSRKDLRKFILEDLNEESEKNKKNENGSRKRILTEKYIVDEILQILENEEFKDSKSDINALNKYMDSLPSKFSEFFSQDFINKCKKENSLILTFDAIKHNDPKKVIKIKNLKFFREDATLKNKQAVHKDSKNQIKSFYESYKCVGFIWLKNKNDLEESIFVPINSRVIHFGDKDKDIFDFDSYNKEKLLNEINLKRPENKKFNSINEIEFVKFVKPGALLLNFENQQIYYISTLESSSLRAKIKLLNKMDKGKAVSMKKITNPDEYKIIEHVNPLGINLNWTKKLENNN

SEQ ID NO: 1083 - protein, 1401 aa, Myroides injenensis
MKRILGLDLGTTSIGWAYVHEAENVNETSSIQKVGVRVNPLTTEEQTNFEKGKPITTNASRTLARSARRNLQRYKLRRDNLIQILKENNWINNTTSLTETGNHSTFETYELRNKAASEKLTLDQLSRVLLMLNKKRGYKSSRKVNSKEEGQLIDGMEVAKKLYHEQLTPGQLSLQLMNQGVKKLPDYYRSDLNQELESIWNFQQQFYPNILTDKFKEEINGKGLTSTSSAFWNIYNFNTAENKGSRDEKKKQALQWRSEALSKQLSKEIVAYIIADLNGQIYNSSGYLGAISDRSKELYFNNLTVGQYLFKQLKSNPHTSLKNQVFYRQDYLNEFEKIWETQSKFYPKELTAALKREIRDVIIFYQRKLKSQKGLISFCEFEQKQKTINGKTKTIGHRVIPKSSPLFQEFKIWQQLHNVVLRNKKTNEIVSLADEQKVHLFEELNLKGKLKSNQVLKLIENKPKDWELNYTELEGNNTNKALYNAYLDILDIEGYDVRNELKVKLNKDDIELSDLDVNASEIKEMIFSVFKHLGINTEILEFDATLEDKVFEKQASYQLWHLLYSYEEDNSPTGLDRLYNLLHKKFGFKLNHAKLIGNVLFQDDYGSLSSKAIKNIFPYITENNYYTACELAGYKHSKHSLTKEENETRELKNRLTILPKNSLRNPVVEKIINQMINVVNTLIDEENNILIAQGKEPNFQFDEIRIELARELKKNAKEREELTKSINKSKTDHEKIIKILQKEDGIKNPTRNDIVRFKLYSELKNNGYKDLYTNEYIERKDIFTKEYDIEHIIPQSKLFDDSFSNKTLVRRNVNLKKGNQTAYDFILCEYGQEKANEFETRITNLYNLGKDEGISKSKFKKLLMQESEIGNGFIERDLRETQYIAKKAKSLLLEITRNVISTSGSITDRLREDWGLINVMKELNLQKYRDAGLTEFVKMKDGNKKEVIIDWTKRNDHRHHAMDALTIAFTKHNHIQYLNHLNARKNVNNELHNNIIAIEKLETTLVSDERGNKKRIFKEPIANFRTIAKSHLEAILVSHKAKNKVVTKNINKISGKKISQQTLTPRGQLHKETIYGKIRQYVSKQEKVGPKFTIEVIEQVSNPTYRNLLLKRLEENNNDPKKAFGGKNSLNKNPIYINLEKNIKVPEVLKLVWLEDNYTIRKEISPDLKIDKVIDQGVKQILQNRLAQYKGDSKLAFSNLDANPIWLNEDKGIAIKRVTISGIATAQPLHRKKDHLGQPILDHNGQEIPVDFISTGNNHHVAIYEDENGKLQESVVSHFEAVERVNQKLPIIDKTFNQHLGWKFLFTMKQNELFLFPSDDFNPNEIDLFDKQNYTVISKHLFRIQKLSTKDYSFRHHLETNVEEIKDLKTITWRREGLNGIQNIIKVRTNHLGEIIHIGEY

SEQ ID NO: 1084 - protein, 1466 aa, Myroides odoratus
MKNILGLDLGTNSIGWALVKEDFENKQGEILGLGSRIIPMSQDILGEFGRGNSISQTADRTGYRGVRRLRERHLLRRERLHRVLNILGFLPNHYAKEIDFTKRLGKFINHAEPKLSFDKEFIFKDSFNEMLKDFQQNQPGFIINKHGEEALVPYDWTIYYLRKKALTQKIDKEELAWILLNFNQKRGYYQLRGEEEEENTNKLVEFYSLKIIDVIADNEVNKKGEVWYSLHLENGWIYRRSSKISLVDWKDKVRDFIVTTDVNDDGSEKLDKDGVVKRSFRAPSADDWTLLKKKTEQDIDNSNKTVGAYIYENLLLNPKQKIKGKLVRTIERKFYKDELKQILEKQKEFHQELQNEQLLQDCVRELYKYNEQHQQMLESKDFVHLFLNDIIFYQRPLRSQKSLISNCTLEKRVSRDGVVFPIKVISKSNPYYQEFRLLQWLQNLAIYRKDDDVNVTQEFLNSIESWENLLQFLNAKKEIKQEQLIKFLLEQKGLKGNSLKTAILTYRWNYVTDKVYPMNETRSLIQDKLKKVENVATDFLSFDNEMALWHIIYSVNDKIEYEKALAKFASKHNLDEISFVESFKKFPPFKSDYGSFSEKAIKKLLPLMRFGSVWNKNNIVPSVLDRIDKILTGEYDEKIKIRVREKAEQFQLNQIEDFQNLPLWLAQYVVYDRHSEAEIAGKWNSVKDLENYLKEFKQHSLRNPIVEQIITETLRVVKDIWQQYGNGVQNFFDEIHIELGREMKNTADERKRITNSVTENENTNLRIKALLVELKEDTNIENVRPHSPMQQEILKIYEEGVLNAVENIDEDILKISKTAQPSKSELIRYKLWLEQKYQSPYTGEMIPLSRLFTSDYEIEHVIPQSRYFDDSLSNKVICEAAVNKRKDNQLGLEFIKNHHSEKIELGNGRTAQVLEVEAYESFVKKNYDKNRGKRNKLLLEDVPEKMIERQLNDTRYISKFVTHLLSNIVRKDEVNSKDDGINSKNIIPGNGKITSQLKQDWGLNDVWNELILPRFERMNNLTNSTDFTSTNTNGKIIPTVPLEYSKGFSKKRIDHRHHALDALVIALATRDHVNLLNNESALPKKDRTKEEQKSFRFDLQVNLRNKEKYFNVKEGREKEKFTTFKKPWNTLTQDTRDALENMVVSFKQNLRVINKATNYYESYTDENGNLRLDKYGNPKKELISQKGTNWAIRKSLHKETVSGQIHLDRVKVTKGKIVTATRKSLDSSFNEKSIESITDTGIQKILRNYLKAKDNKPDVAFSPEGIEELNKSISVYNEGKNHQPIIKVRIFEQGSKFPVGETGNKIAKFVEAAKGTNLFFGIYQDKTGKRSYDTIPLNLVIERLKQGLSPVPETNEKGHQLLFHLSPNDLVYVPTIDDNEQLDSNRVYKFTDSSDTTCNFIPSNISAIIFNINSKEQEKRGINYPIQNELGVGSPQSKNQKSFDGFMIKEVCIKLKVDRLGNISKT

SEQ ID NO: 1085 - protein, 241 aa, Neisseria lactamica
MAAFKPNPMNYILGLDIGIASVGWAMVEIDKEENPIRLIDLGVRVFERAEMPKTGDSLAMARRLARSVRRLTRRRAHRLLRARRLLKREGVLQDADFDENGLVKSLPNTPWQLRAAALDRKLTCLEWSAVLLHLIKHRGYLSQRKNEGETADKELGALLKGVADNAHALQTGDFRTPAELALNKFEKESGHIRNQRGDYSHTFSRKDLQAELNLLFEKQKEFGNPHVSDGLKEGIETLLMA

SEQ ID NO: 1086 - protein, 666 aa, Neisseria lactamica
MAAFKPNPMNYILGLDIGIASVGWAMVEVDEEENPIRLIDLGVRVFERAEVPKTGDSLAMARRLARSVRRLTRRRAHRLLRARRLLKREGVLQDADFDENGLVKSLPNTPWQLRAAALDRKLTCLEWSAVLLHLVKHRGYLSQRKNEGETADKELGALLKGVADNAHALQTGDFRTPAELALNKFEKESGHIRNQRGDYSHTFSRKDLQAELNLLFEKQKEFGNPHVSDGLKEDIETLLMAQRPALSGDAVQKMLGHCTFEPAEPKAAKNTYTAERFIWLTKLNNLRILEQGSERPLTDTERATLMDEPYRKSKLTYAQARKLLGLEDTAFFKGLRYGKDNAEASTLMEMKAYHAISRALEKEGLKDKKSPLNLSTELQDEIGTAFSLFKTDKDITGRLKDRVQPEILEALLKHISFDKFVQISLKALRRIVPLMEQGKRYDEACAEIYGDHYCKKNAEEKIYLPPIPADEIRNPVVLRALSQARKVINCVVRRYGSPARIHIETAREVGKSFKDRKEIEKRQEENRKDREKAAAKFREYFPNFVGEPKSKDILKLRLYEQQHGKCLYSGKEINLVRLNEKGYVEIDHALPFSRTWDDSFNNKVLVLGSENQNKGNQTPYEYFNGKDNSREWQEFKARVETSRFPRSKNNGFCCKNSMKKDLKNAT

SEQ ID NO: 1087 - protein, 828 aa, Neisseria lactamica
MLGHCTFEPAEPKAAKNTYTAERFIWLTKLNNLRILEQGSERPLTDTERATLMDEPYRKSKLTYAQARKLLGLEDTAFFKGLRYGKDNAEASTLMEMKAYHAISRALEKEGLKDKKSPLNLSTELQDEIGTAFSLFKTDKDITGRLKDRVQPEILEALLKHISFDKFVQISLKALRRIVPLMEQGKRYDEACAEIYGDHYGKKNTEEKIYLPPIPADEIRNPVVLRALSQARKVINAVVRRYDSPARIHIETAREVGKSFKDRKEIEKRQEENRKDREKAAAKFREYFPNFVGEPKSKDILKLRLYEQQHGKCLYSGKEINLVRLNEKGYVEIDHALPFSRTWDDSFNNKVLVLGSENQNKGNQTPYEYFNGKDNSREWQEFKARVETSRFPRSKKQRILLQKFDEEGFKERNLNDTRYVNRFLCQFVADHILLTGKGKRRVFASNGQITNLLRGFWGLRKVRAENDRHHALDAVVVACSTVAMQQKITRFVRYKEMNAFDGKTIDKETGEVLHQKAHFPQPWEFFAQEVMIRVFGKPDGKPEFEEADTSEKLRTLLAEKLSSRPEAVHEYVTPLFVSRAPNRKMSGQGHMETVKSAKRLDEGISVLRVPLTQLKLKDLEKMVNREREPKLYDALKAQLETHKDDPAKAFAEPFYKYDKAGSRTQQVKAVRIEQVQKTGVWVRNHNGIADNATMVRVDVFEKGGKYYLVPIYSWQVAKGILPDRAVVAFKDEEDWTVMDDSFEFRFVLYANDLIKAELKKETFFGYFSGLDRSTGNISLRSHDLDKTKGKDGVYRIGIKTALSFQKHQIDELGKEIRPCRLKKRPPVR

SEQ ID NO: 1088 - protein, 408 aa, Neisseria lactamica
MNDTRYVNRFLCQFVADHILLTGKGKRRVFASNGQITNLLRGFWGLRKVRTENDRHHALDAVVVACSTVAMQQKITRFVRYKEMNAFDGKTIDKETGEVLHQKAHFPQPWEFFAQEVMIRVFGKPDGKPEFEEADTPEKLRTLLAEKLSSRPEAVHEYVTPLFVSRAPNRKMSGQGHMETVKSAKRLDEGISVLRVPLTQLKLKGLEKMVNREREPKLYDALKAQLETHKDDPAKAFAEPFYKYDKAGSRTQQVKAVRIEQVQKTGVWVRNHNGIADNATMVRVDVFEKGGKYYLVPIYSWQVAKGILPDRAVVAFKDEEDWTVMDDSFEFRFVLYANDLIKLTAKKNEFLGYFVSLNRATGAIDIRTHDTDSTKGKNGIFQSVGVKTALSFQKTKSTNSAKKSDHAV

SEQ ID NO: 1089 - protein, 1082 aa, Neisseria meningitidis
MAAFKPNPINYILGLDIGIASVGWAMVEIDEDENPICLIDLGVRVFERAEVPKTGDSLAAARRLARSVRRLTRRRAHRLLRARRLLKREGVLQAADFDENGLIKSLPNTPWQLRAAALDRKLTPLEWSAVLLHLIKHRGYLSQRKNEGETADKELGALLKGVADNAHALQTGDFRTPAELALNKFEKESGHIRNQRGDYSHTFSRKDLQAELILLFEKQKEFGNPHVSGGLKEGIETLLMTQRPALSGDAVQKMLGHCTFEPAEPKAAKNTYTAERFIWLTKLNNLRILEQGSERPLTDTERATLMDEPYRKSKLTYAQARKLLGLEDTAFFKGLRYGKDNAEASTLMEMKAYHAISRALEKEGLKDKKSPLNLSPELQDEIGTAFSLFKTDEDITGRLKDRVQPEILEALLKHISFDKFVQISLKALRRIVPLMEQGKRYDEACAEIYGDHYGKKNTEEKIYLPPIPADEIRNPVVLRALSQARKVINGVVRRYGSPARIHIETAREVGKSFKDRKEIEKRQEENRKDREKAAAKFREYFPNFVGEPKSKDILKLRLYEQQHGKCLYSGKEINLGRLNEKGYVEIDHALPFSRTWDDSFNNKVLVLGSENQNKGNQTPYEYFNGKDNSREWQEFKARVETSRFPRSKKQRILLQKFDEDGFKERNLNDTRYVNRFLCQFVADRMRLTGKGKKRVFASNGQITNLLRGFWGLRKVRAENDRHHALDAVVVACSTVAMQQKITRFVRYKEMNAFDGKTIDKETGEVLHQKTHFPQPWEFFAQEVMIRVFGKPDGKPEFEEADTPEKLRTLLAEKLSSRPEAVHEYVTPLFVSRAPNRKMSGQGHMETVKSAKRLDEGVSVLRVPLTQLKLKDLEKMVNREREPKLYEALKARLEAHKDDPAKAFAEPFYKYDKAGNRTQQVKAVRVEQVQKTGVWVRNHNGIADNATMVRVDVFEKGDKYYLVPIYSWQVAKGILPDRAVVQGKDEEDWQLIDDSFNFKFSLHPNDLVEVITKKARMFGYFASCHRGTGNINIRIHDLDHKIGKNGILEGIGVKTALSFQKYQIDELGKEIRPCRLKKRPPVR

SEQ ID NO: 1090 - protein, 976 aa, Neisseria meningitidis
MAAFKPNPINYILGLDIGIASVGWAMVEIDEDENPICLIDLGVRVFERAEVPKTGDSLAAARRLARSVRRLTRRRAHRLLRARRLLKREGVLQAADFDENGLIKSLPNTPWQLRAAALDRKLTPLEWSAVLLHLIKHRGYLSQRKNEGETADKELGALLKGVADNAHALQTGDFRTPAELALNKFEKESGHIRNQRGDYSHTFSRKDLQAELILLFEKQKEFGNPHVSGGLKEGIETLLMTQRPALSGDAVQKMLGHCTFEPAEPKAAKNTYTAERFIWLTKLNNLRILEQGSERPLTDTERATLMDEPYRKSKLTYAQARKLLGLEDTAFFKGLRYGKDNAEASTLMEMKAYHAISRALEKEGLKDKKSPLNLSPELQDEIGTAFSLFKTDEDITGRLKDRIQPEILEALLKHISFDKFVQISLKALRRIVPLMEQGKRYDEACAEIYGDHYGKKNTEEKIYLPPIPADEIRNPVVLRALSQARKVINGVVRRYGSPARIHIETAREVGKSFKDRKEIEKRQEENRKDREKAAAKFREYFPNFVGEPKSKDILKLRLYEQQHGKCLYSGKEINLGRLNEKGYVEIDHALPFSRTWDDSFNNKVLVLGSENQNKGNQTPYEYFNGKDNSREWQEFKARVETSRFPRSKKQRILLQKFDEDGFKERNLNDTRYVNRFLCQFVADRMRLTGKGKKRVFASNGQITNLLRGFWGLRKVRAENDRHHALDAVVVACSTVAMQQKITRFVRYKEMNAFDGKTIDKETGEVLHQKTHFPQPWEFFAQEVMIRVFGKPDGKPEFEEADTPEKLRTLLAEKLSSRPEAVHEYVTPLFVSRAPNRKMSGQGHMETVKSAKRLDEGVSVLRVPLTQLKLKDLEKMVNREREPKLYEALKARLEAHKDDPAKAFAEPFYKYDKAGNRTQQVKAVRVEQVQKTGVWVRNHNGIADNATMVRVDVFEKGDKYYLVPIYSWQVAKGIFAG

SEQ ID NO: 1091 - protein, 1081 aa, Neisseria meningitidis
MAAFKPNPINYILGLDIGIASVGWAMVEIDEDENPICLIDLGVRVFERAEVPKTGDSLAAARRLARSVRRLTRRRAHRLLRARRLLKREGVLQAADFDENGLIKSLPNTPWQLRSAALDRKLTPLEWSAVLLHLIKHRGYLSQRKNEGETADKELGALLKGVADNAHALQTGDFRTPAELALNKFEKESGHIRNRRGDYSHTFSRKDLQAELDLLFEKQKEFGNPHISDDLKEGIETLLMTQRPALSGDAVQKMLGHCTFEPTEPKAAKNTYTAERFVWLTKLNNLRILEQGSERPLTDTERATLMDEPYRKSKLTYAQARKLLELDDTAFFKGLRYGKDNAEASTLMEMKAYHAISRALEKEGLKDKKSPLNLSPELQDEIGTAFSLFKTDEDITGRLKDRVQPEILEVLLKHISFDKFVQISLKALRRIVPLMEQGKRYDEACAEIYGDHDGKKNTEEKIYLPPIPADEIRNPVVLRALSQARKVINAVVRRYGSPARIHIETAREVGKSFKDRKEIEKRQEENRKDREKAAAKFREYFPNFVGEPKSKDILKLRLYEQQHGKCLYSGKEINLGRLNEKGYVEIDHALPFSRTWDDSFNNKVLVLGSENQNKGNQTPYEYFNGKDNSREWQEFKARVETSRFPRSKKQRILLQKFDEEGFKERNLNDTRYVNRFLCQFVADHMLLTGKGKRRVFASNGQITNLLRGFWGLRKVRAENNRHHALDAVVVACSTVAMQQKITRFVRYKEMNAFDGKTIDKETGEVLHQKTHFPQPWEFFAQEVMIRVFGKPDGKPEFEEADTPEKLRTLLAEKLSSRPEAVHEYVTPLFVSRAPNRKMSGQGHMETVKSAKRLDEGVSVLRVPLTQLKLKDLEKMVNREREPKLYEALKARLEAHKDDPAKAFAEPFYKYDKAGNRTQQVKAVRVEQVQKTGVWVRNHNGIADNATMVRVDVFEKAGKYYLVPIYSWQVAKGILPDRAVVAYADEEGWTVIDESFRFKFVLYSNDLIKVQLKKDSFLGYFSGLDRATGAISLREHDLEKSKGKDGMHRIGVKTALSFQKYQIDEMGKEIRLCRLKKRPPVR

SEQ ID NO: 1092 - protein, 1081 aa, Neisseria meningitidis
MAAFKPNPINYILGLDIGIASVGWAMVEIDEDENPICLIDLGVRVFERAEVPKTGDSLAAARRLARSVRRLTRRRAHRLLRARRLLKREGVLQAADFDENGLIKSLPNTPWQLRSAALDRKLTPLEWSAVLLHLIKHRGYLSQRKNEGETADKELGALLKGVANNAHALQTGDFRTPAELALNKFEKESGHIRNQRGDYSHTFSRKDLQAELILLFEKQKEFGNPHVSGGLKEGIETLLMTQRPALSGDAVQKMLGHCTFEPAEPKAAKNTYTAERFIWLTKLNNLRILEQGSERPLTDTERATLMDEPYRKSKLTYAQARKLLGLEDTAFFKGLRYGKDNAEASTLMEMKAYHAISRALEKEGLKDKKSPLNLSPELQDEIGTAFSLFKTDEDITGRLKDRIQPEILEALLKHISFDKFVQISLKALRRIVPLMEQGKRYDEACAEIYGDHYGKKNTEEKIYLPPIPADEIRNPVVLRALSQARKVINGVVRRYGSPARIHIETAREVGKSFKDRKEIEKRQEENRKDREKAAAKFREYFPNFVGEPKSKDILKLRLYEQQHGKCLYSGKEINLGRLNEKGYVEIDHALPFSRTWDDSFNNKVLVLGSENQNKGNQTPYEYFNGKDNSREWQEFKARVETSRFPRSKKQRILLQKFDEDGFKERNLNDTRYVNRFLCQFVADRMRLTGKGKKRVFASNGQITNLLRGFWGLRKVRAENDRHHALDAVVVACSTVAMQQKITRFVRYKEMNAFDGKTIDKETGEVLHQKTHFPQPWEFFAQEVMIRVFGKPDGKPEFEEADTPEKLRTLLAEKLSSRPEAVHEYVTPLFVSRAPNRKMSGQGHMETVKSAKRLDEGVSVLRVPLTQLKLKDLEKMVNREREPKLYEALKARLEAHKDDPAKAFAEPFYKYDKAGNRTQQVKAVRVEQVQKTGVWVRNHNGIADNATMVRVDVFEKAGKYYLVPIYSWQVAKGILPDRAVVAYADEEGWTVIDESFRFKFVLYSNDLIKVQLKKDSFLGYFSGLDRATGAISLREHDLEKSKGKDGMHRIGVKTALSFQKYQIDEMGKEIRLCRLKKRPPVR

SEQ ID NO: 1093 - protein, 1082 aa, Neisseria meningitidis
MAAFKPNPINYILGLDIGIASVGWAMVEIDEDENPICLIDLGVRVFERAEVPKTGDSLAMARRLARSVRRLTRRRAHRLLRARRLLKREGVLQAADFDENGLIKSLPNTPWQLRAAALDRKLTPLEWSAVLLHLIKHRGYLSQRKNEGETADKELGALLKGVADNAHALQTGDFRTPAELALNKFEKESGHIRNQRGDYSHTFSRKDLQAELILLFEKQKEFGNPHVSGGLKEGIETLLMTQRPALSGDAVQKMLGHCTFEPAEPKAAKNTYTAERFIWLTKLNNLRILEQGSERPLTDTERATLMDEPYRKSKLTYAQARKLLGLEDTAFFKGLRYGKDNAEASTLMEMKAYHAISRALEKEGLKDKKSPLNLSPELQDEIGTAFSLFKTDEDITGRLKDRIQPEILEALLKHISFDKFVQISLKALRRIVPLMEQGKRYDEACAEIYGDHYGKKNTEEKIYLPPIPADEIRNPVVLRALSQARKVINGVVRRYGSPARIHIETAREVGKSFKDRKEIEKRQEENRKDREKAAAKFREYFPNFVGEPKSKDILKLRLYEQQHGKCLYSGKEINLGRLNEKGYVEIDHALPFSRTWDDSFNNKVLVLGSENQNKGNQTPYEYFNGKDNSREWQEFKARVETSRFPRSKKQRILLQKFDEDGFKERNLNDTRYVNRFLCQFVADRMRLTGKGKKRVFASNGQITNLLRGFWGLRKVRAENDRHHALDAVVVACSTVAMQQKITRFVRYKEMNAFDGKTIDKETGEVLHQKTHFPQPWEFFAQEVMIRVFGKPDGKPEFEEADTPEKLRTLLAEKLSSRPEAVHEYVTPLFVSRAPNRKMSGQGHMETVKSAKRLDEGVSVLRVPLTQLKLKDLEKMVNREREPKLYEALKARLEAHKDDPAKAFAEPFYKYDKAGNRTQQVKAVRVEQVQKTGVWVRNHNGIADNATMVRVDVFEKGDKYYLVPIYSWQVAKGILPDRAVVQGKDEEDWQLIDDSFNFKFSLHPNDLVEVITKKARMFGYFASCHRGTGNINIRIHDLDHKIGKNGILEGIGVKTALSFQKYQIDELGEEIRPCRLKKRPPVR

SEQ ID NO: 1094 - protein, 1082 aa, Neisseria meningitidis
MAAFKPNPINYILGLDIGIASVGWAMVEIDEDENPICLIDLGVRVFERAEVPKTGDSLAMARRLARSVRRLTRRRAHRLLRARRLLKREGVLQAADFDENGLIKSLPNTPWQLRAAALDRKLTPLEWSAVLLHLIKHRGYLSQRKNEGETADKELGALLKGVADNAHALQTGDFRTPAELALNKFEKESGHIRNQRGDYSHTFSRKDLQAELILLFEKQKEFGNPHVSGGLKEGIETLLMTQRPALSSDAVQKMLGHCTFEPAEPKAAKNTYTAERFIWLTKLNNLRILEQGSERPLTDTERATLMDEPYRKSKLTYAQARKLLGLEDTAFFKGLRYGKDNAEASTLMEMKAYHAISRALEKEGLKDKKSPLNLSPELQDEIGTAFSLFKTDEDITGRLKDRIQPEILEALLKHISFDKFVQISLKALRRIVPLMEQGKRYDEACAEIYGDHYGKKNTEEKIYLPPIPADEIRNPVVLRALSQARKVINGVVRRYGSPARIHIETAREVGKSFKDRKEIEKRQEENRKDREKAAAKFREYFPNFVGEPKSKDILKLRLYEQQHGKCLYSGKEINLGRLNEKGYVEIDHALPFSRTWDDSFNNKVLVLGSENQNKGNQTPYEYFNGKDNSREWQEFKARVETSRFPRSKKQRILLQKFDEDGFKERNLNDTRYVNRFLCQFVADRMRLTGKGKKRVFASNGQITNLLRGFWGLRKVRAENDRHHALDAVVVACSTVAMQQKITRFVRYKEMNAFDGKTIDKETGEVLHQKTHFPQPWEFFAQEVMIRVFGKPDGKPEFEEADTPEKLRTLLAEKLSSRPEAVHEYVTPLFVSRAPNRKMSGQGHMETVKSAKRLDEGVSVLRVPLTQLKLKDLEKMVNREREPKLYEALKARLEAHKDDPAKAFAEPFYKYDKAGNRTQQVKAVRVEQVQKTGVWVRNHNGIADNATMVRVDVFEKGDKYYLVPIYSWQVAKGILPDRAVVQGKDEEDWQLIDDSFNFKFSLHPNDLVEVITKKARMFGYFASCHRGTGNINIRIHDLDHKIGKNGILEGIGVKTALSFQKYQIDELGKEIRPCRLKKRPPVR

SEQ ID NO: 1095 - protein, 1082 aa, Neisseria meningitidis
MAAFKPNPINYILGLDIGIASVGWAMVEIDEDENPICLIDLGVRVFERAEVPKTGDSLAMARRLARSVRRLTRRRAHRLLRARRLLKREGVLQAADFDENGLIKSLPNTPWQLRAAALDRKLTPLEWSAVLLHLIKHRGYLSQRKNEGETADKELGALLKGVADNAHALQTGDFRTPAELALNKFEKESGHIRNQRGDYSHTFSRKDLQAELILLFEKQKEFGNPHVSGGLKEGIETLLMTQRPALSSDAVQKMLGHCTFEPAEPKAAKNTYTAERFIWLTKLNNLRILEQGSERPLTDTERATLMDEPYRKSKLTYAQARKLLGLEDTAFFKGLRYGKDNAEASTLMEMKAYHAISRALEKEGLKDKKSPLNLSPELQDEIGTAFSLFKTDEDITGRLKDRIQPEILEALLKHISFDKFVQISLKALRRIVPLMEQGKRYDEACAEIYGDHYGKKNTEEKIYLPPIPADEIRNPVVLRALSQARKVINGVVRRYGSPARIHIETAREVGKSFKDRKEIEKRQEENRKDREKAAAKFREYFPNFVGEPKSKDILKLRLYEQQHGKCLYSGKEINLGRLNEKGYVEIDHALPFSRTWDDSFNNKVLVLGSENQNKGNQTPYEYFNGKDNSREWQEFKARVETSRFPRSKKQRILLQKFDEDGFKERNLNDTRYVNRFLYQFVADRMRLTGKGKKRVFASNGQITNLLRGFWGLRKVRAENDRHHALDAVVVACSTVAMQQKITRFVRYKEMNAFDGKTIDKETGEVLHQKTHFPQPWEFFAQEVMIRVFGKPDGKPEFEEADTPEKLRTLLAEKLSSRPEAVHEYVTPLFVSRAPNRKMSGQGHMETVKSAKRLDEGVSVLRVPLTQLKLKDLEKMVNREREPKLYEALKARLEAHKDDPAKAFAEPFYKYDKAGNRTQQVKAVRVEQVQKTGVWVRNHNGIADNATMVRVDVFEKGDKYYLVPIYSWQVAKGILPDRAVVQGKDEEDWQLIDDSFNFKFSLHPNDLVEVITKKARMFGYFASCHRGTGNINIRIHDLDHKIGKNGILEGIGVKTALSFQKYQIDELGKEIRPCRLKKRPPVR

SEQ ID NO: 1096 - protein, 1081 aa, Neisseria meningitidis
MAAFKPNPINYILGLDIGIASVGWAMVEIDEDENPICLIDLGVRVFERAEVPKTGDSLAMARRLARSVRRLTRRRAHRLLRARRLLKREGVLQAADFDENGLIKSLPNTPWQLRAAALDRKLTPLEWSAVLLHLIKHRGYLSQRKNEGETADKELGALLKGVADNAHALQTGDFRTPAKLALNKFEKESGHIRNQRGDYSHTFSRKDLQAELNLLFEKQKEFGNPHISDGLKEGIETLLMTQRPALSGDAVQKMLGHCTFEPTEPKAAKNTYTAERFVWLTKLNNLRILEQGSEQPLTDTQRAKLMDEPYRKSKLTYAQARKLLGLEDTAFFKGLRYGKDNAEASTLMEMKAYHAISRALEKEGLKDKKSPLNLSPELQDEIGTAFSLFKTDEDITGRLKDRVQPEILEALLKHISFDKFVQISLKALRRIVPLMEQGKRYNEACAEIYGDHYGKKNTEEKIYLPPIPADEIRNPVVLRALSQARKVINGVVRRYGSPARIHIETAREVGKSFKDRKEIEKRQEENRKDREKAAAKFQEYFPNFVGEPKSKDILKLRLYEQQHGKCLYSGKEINLGRLNEKGYVEIDHALPFSRTWDDSFNNKVLVLGSENQNKGNQTPYEYFNGKDNSREWQEFKARVETSRFPRSKKQRILLQKFDEDGFKERNLNDTRYVNRFLCQFVADRMRLTGKGKKRVFASNGQITNLLRGFWGLRKVRAENDRHHALDAVVVACSTVAMQQKITRFVRYKEMNAFDGKTIDKETGEVLHQKTHFPQPWEFFAQEVMIRVFGKPDGKPEFEEADTPEKLRTLLAEKLSSRPEAVHEYVTPLFVSRAPNRKMSGQGHMETVKSAKRLDEGVSVLRVPLTQLKLKDLEKMVNREREPKLYEALKARLEAHKDDPAKAFAEPFYKYDKAGNRTQQVKAVRVEQVQKTGVWVRNHNGIADNATMVRVDVFEKGDKYYLVPIYSWQVAKGILPDRAVVAYADEEDWTVIDESFRFKFVLYSNDLIKVQLKKDSFLGYFSGLDRATGAISLREHDLEKSKGKDGMHRIGVKTALSFQKYQIDEMGKEIRPCRLKKRPPVR

SEQ ID NO: 1097 - protein, 1081 aa, Neisseria meningitidis
MAAFKPNPINYILGLDIGIASVGWAMVEIDEEENPIRLIDLGVRVFERAEVPKTGDSLAMARRLARSVRRLTRRRAHRLLRARRLLKREGVLQAADFDENGLIKSLPNTPWQLRAAALDRKLTPLEWSAVLLHLIKHRGYLSQRKNEGETADKELGALLKGVADNAHALQTGDFRTPAELALNKFEKECGHIRNQRGDYSHTFSRKDLQAELNLLFEKQKEFGNPHVSGGLKEGIETLLMTQRPALSGDAVQKMLGHCTFEPAEPKAAKNTYTAERFIWLTKLNNLRILEQGSERPLTDTERATLMDEPYRKSKLTYAQARKLLSLEDTAFFKGLRYGKDNAEASTLMEMKAYHTISRALEKEGLKDKKSPLNLSPELQDEIGTAFSLFKTDEDITGRLKDRIQPEILEALLKHISFDKFVQISLKALRRIVPLMEQGKRYDEACAEIYGDHYGKKNTEEKIYLPPIPADEIRNPVVLRALSQARKVINGVVRRYGSPARIHIETAREVGKSFKDRKEIEKRQEENRKDREKAAAKFREYFPNFVGEPKSKDILKLRLYEQQHGKCLYSGKEINLGRLNEKGYVEIDHALPFSRTWDDSFNNKVLVLGSENQNKGNQTPYEYFNGKDNSREWQEFKARVETSRFPRSKKQRILLQKFDEDGFKERNLNDTRYVNRFLCQFVADRMRLTGKGKKRVFASNGQITNLLRGFWGLRKVRAENDRHHALDAVVVACSTVAMQQKITRFVRYKEMNAFDGKTIDKETGEVLHQKTHFPQPWEFFAQEVMIRVFGKPDGKPEFEEADTPEKLRTLLAEKLSSRPEAVHEYVTPLFVSRAPNRKMSGQGHMETVKSAKRLDEGVSVLRVPLTQLKLKDLEKMVNREREPKLYEALKARLEAHKDDPAKAFAEPFYKYDKAGNRTQQVKAVRVEQVQKTGVWVRNHNGIADNATMVRVDVFEKGDKYYLVPIYSWQVAKGILPDRAVVAYADEEDWTVIDESFRFKFVLYSNDLIKVQLKKDSFLGYFSGLDRATGAISLREHDLEKSKGKDGMHRIGVKTALSFQKYQIDEMGKEIRPCRLKKRPPVR

SEQ ID NO: 1098 - protein, 1082 aa, Neisseria meningitidis
MAAFKPNPINYILGLDIGIASVGWAMVEIDEEENPIRLIDLGVRVFERAEVPKTGDSLAMARRLARSVRRLTRRRAHRLLRARRLLKREGVLQAADFDENGLIKSLPNTPWQLRAAALDRKLTPLEWSAVLLHLIKHRGYLSQRKNEGETADKELGALLKGVADNAHALQTGDFRTPAELALNKFEKECGHIRNQRGDYSHTFSRKDLQAELNLLFEKQKEFGNPHVSGGLKEGIETLLMTQRPALSGDAVQKMLGHCTFEPAEPKAAKNTYTAERFIWLTKLNNLRILEQGSERPLTDTERATLMDEPYRKSKLTYAQARKLLGLEDTAFFKGLRYGKDNAEASTLMEMKAYHAISRALEKEGLKDKKSPLNLSPELQDEIGTAFSLFKTDEDITGRLKDRIQPEILEALLKHISFDKFVQISLKALRRIVPLMEQGKRYDEACAEIYGDHYGKKNTEEKIYLPPIPADEIRNPVVLRALSQARKVINGVVRRYGSPARIHIETAREVGKSFKDRKEIEKRQEENRKDREKAAAKFREYFPNFVGEPKSKDILKLRLYEQQHGKCLYSGKEINLVRLNEKGYVEIDHALPFSRTWDDSFNNKVLVLGSENQNKGNQTPYEYFNGKDNSREWQEFKARVETSRFPRSKKQRILLQKFDEEGFKERNLNDTRYVNRFLCQFVADHILLTGKGKRRVFASNGQITNLLRGFWGLRKVRAENDRHHALDAVVVACSTVAMQQKITRFVRYKEMNAFDGKTIDKETGEVLHQKTHFPQPWEFFAQEVMIRVFGKPDGKPEFEEADTPEKLRTLLAEKLSSRPEAVHEYVTPLFVSRAPNRKMSGQGHMETVKSAKRLDEGVSVLRVPLTQLKLKDLEKMVNREREPKLYEALKARLEAHKDDPAKAFAEPFYKYDKAGNRTQQVKAVRVEQVQKTGVWVRNHNGIADNATMVRVDVFEKGGKYYLVPIYSWQVAKGILPDRAVVQGKDEEDWQLIDDSFNFKFSLHPNDLVEVITKKARMFGYFASCHRGTGNINIRIHDLDHKIGKNGILEGIGVKTALSFQKYQIDELGKEIRPCRLKKRPPVR

SEQ ID NO: 1099 - protein, 1081 aa, Neisseria meningitidis
MAAFKPNPINYILGLDIGIASVGWAMVEIDEEENPIRLIDLGVRVFERAEVPKTGDSLAMARRLARSVRRLTRRRAHRLLRARRLLKREGVLQAADFDENGLIKSLPNTPWQLRAAALDRKLTPLEWSAVLLHLIKHRGYLSQRKNEGETADKELGALLKGVADNAHALQTGDFRTPAELALNKFEKESGHIRNQRGDYSHTFSRKDLQAELILLFEKQKEFGNPHVSGGLKEGIETLLMTQRPALSGDAVQKMLGHCTFEPAEPKAAKNTYTAERFIWLTKLNNLRILEQGSERPLTDTERATLMDEPYRKSKLTYAQARKLLGLEDTAFFKGLRYGKDNAEASTLMEMKAYHAISRALEKEGLKDKKSPLNLSPELQDEIGTAFSLFKTDEDITGRLKDRVQPEILEALLKHISFDKFVQISLKALRRIVPLMEQGKRYDEACAEIYGDHYGKKNTEEEIYLPPITADEIRNPVVLRALSQARKVINAVVRRYGSPARIHIETAREVGKSFKDRKEIEKRQEENRKDREKAAAKFREYFPNFVGEPKSKDILKLRLYEQQHGKCLYSGKEINLVRLNEKGYVEIDHALPFSRTWDDSFNNKVLVLGSENQNKGNQTPYEYFNGKENSREWQEFKARVETSRFPRSKKQRILLQKFDEDGFKERNLNDTRYVNRFLCQFVADRMRLTGKGKKRVFASNGQITNLLRGFWGLHKVRAENDRHHALDAVVVACSTIAMQQKITRFVRYKEMNAFDGKTIDKETGEVLHQKAHFPQPWEFFAQEVMIRVFGKPDGKPEFEEADTPEKLRTLLAEKLSSRPEAVHEYVTPLFVSRAPNRKMSGQGHMETVKSAKRLDEGISVLRVPLTQLKLKDLEKMVNRAREPKLYEALKARLEAHKDDPAKAFAEPFYKYDKAGNRTQQVKAVRVEQVQKTGVWVRNHNGIADNATMVRVDVFEKAGKYYLVPIYSWQVAKGILPDRAVVAYADEEDWTVIDESFRFKFVLYSNDLIKVQLKKDSFLGYFSGLDRATGAISLREHDLEKSKGKDGMHRIGVKTALSFQKYQIDEMGKEIRPCRLKKRPPVR

SEQ ID NO: 1100 - protein, 1082 aa, Neisseria meningitidis
MAAFKPNPINYILGLDIGIASVGWAMVEIDEEENPIRLIDLGVRVFERAEVPKTGDSLAMARRLARSVRRLTRRRAHRLLRARRLLKREGVLQAADFDENGLIKSLPNTPWQLRAAALDRKLTPLEWSAVLLHLIKHRGYLSQRKNEGETADKELGALLKGVANNAHALQTGDFRTPAELALNKFEKESGHIRNQRGDYSHTFSRKDLQAELILLFEKQKEFGNPHVSGGLKEGIETLLMTQRPALSGDAVQKMLGHCTFEPAEPKAAKNTYTAERFIWLTKLNNLRILEQGSERPLTDTERATLMDEPYRKSKLTYAQARKLLGLEDTAFFKGLRYGKDNAEASTLMEMKAYHAISRALEKEGLKDKKSPLNLSSELQDEIGTAFSLFKTDEDITGRLKDRVQPEILEALLKHISFDKFVQISLKALRRIVPLMEQGKRYDEACAEIYGDHYGKKNTEEKIYLPPIPADKIRNPVVLRALSQARKVINGVVRRYGSPARIHIETAREVGKSFKDRKEIEKRQEENRKDREKAAAKFREYFPNFVGEPKSKDILKLRLYEQQHGKCLYSGKEINLVRLNEKGYVEIDHALPFSRTWDDSFNNKVLVLGSENQNKGNQTPYEYFNGKDNSREWQEFKARVETSRFPRSKKQRILLQKFDEDGFKECNLNDTRYVNRFLCQFVADHILLTGKGKRRVFASNGQITNLLRGFWGLRKVRAENDRHHALDAVVVACSTVAMQQKITRFVRYKEMNAFDGKTIDKETGKVLHQKTHFPQPWEFFAQEVMIRVFGKPDGKPEFEEADTPEKLRTLLAEKLSSRPEAVHEYVTPLFVSRAPNRKMSGAHKDTLRSAKRFVKHNEKISVKRVWLTEIKLADLENMVNYKNGREIELYEALKARLEAYGGNAKQAFDPKDNPFYKKGGQLVKAVRVEKTQESGVLLNKKNAYTIADNGDMVRVDVFCKVDKKGKNQYFIVPIYAWQVAENILPDIDCKGYRIDDSYTFCFSLHKYDLIAFQKDEKSKVEFAYYINCDSSNGRFYLAWHDKGSKEQQFRISTQNLVLIQKYQVNELGKEIRPCRLKKRPPVR

SEQ ID NO: 1101 - protein, 1082 aa, Neisseria meningitidis
MAAFKPNPINYILGLDIGIASVGWAMVEIDEEENPIRLIDLGVRVFERAEVPKTGDSLAMARRLARSVRRLTRRRAHRLLRARRLLKREGVLQAADFDENGLIKSLPNTPWQLRAAALDRKLTPLEWSAVLLHLIKHRGYLSQRKNEGETADKELGALLKGVANNAHALQTGDFRTPAELALNKFEKESGHIRNQRGDYSHTFSRKDLQAELILLFEKQKEFGNPHVSGGLKEGIETLLMTQRPALSGDAVQKMLGHCTFEPAEPKAAKNTYTAERFIWLTKLNNLRILEQGSERPLTDTERATLMDEPYRKSKLTYAQARKLLGLEDTAFFKGLRYGKDNAEASTLMEMKAYHAISRALEKEGLKDKKSPLNLSSELQDEIGTAFSLFKTDEDITGRLKDRVQPEILEALLKHISFDKFVQISLKALRRIVPLMEQGKRYDEACAEIYGDHYGKKNTEEKIYLPPIPADEIRNPVVLRALSQARKVINGVVRRYGSPARIHIETAREVGKSFKDRKEIEKRQEENRKDREKAAAKFREYFPNFVGEPKSKDILKLRLYEQQHGKCLYSGKEINLVRLNEKGYVEIDHALPFSRTWDDSFNNKVLVLGSENQNKGNQTPYEYFNGKDNSREWQEFKARVETSRFPRSKKQRILLQKFDEDGFKECNLNDTRYVNRFLCQFVADHILLTGKGKRRVFASNGQITNLLRGFWGLRKVRAENDRHHALDAVVVACSTVAMQQKITRFVRYKEMNAFDGKTIDKETGKVLHQKTHFPQPWEFFAQEVMIRVFGKPDGKPEFEEADTPEKLRTLLAEKLSSRPEAVHEYVTPLFVSRAPNRKMSGAHKDTLRSAKRFVKHNEKISVKRVWLTEIKLADLENMVNYKNGREIELYEALKARLEAYGGNAKQAFDPKDNPFYKKGGQLVKAVRVEKTQESGVLLNKKNAYTIADNGDMVRVDVFCKVDKKGKNQYFIVPIYAWQVAENILPDIDCKGYRIDDSYTFCFSLHKYDLIAFQKDEKSKVEFAYYINCDSSNGRFYLAWHDKGSKEQQFRISTQNLVLIQKYQVNELGKEIRPCRLKKRPPVR

SEQ ID NO: 1102 - protein, 1082 aa, Neisseria meningitidis
MAAFKPNPINYILGLDIGIASVGWAMVEIDEEENPIRLIDLGVRVFERAEVPKTGDSLAMARRLARSVRRLTRRRAHRLLRTRRLLKREGVLQAANFDENGLIKSLPNTLWQLRAAALDRKLTPLEWSAVLLHLIKHRGYLSQRKNEGETADKELGALLKGVAGNAHALQTGDFRTPAELALNKFEKESGHIRNQRGDYSHTFSRKDLQAELNLLFEKQKEFGNPHISDGLKEGIETLLMTQRPALSGDAVQKMLGHCTFEPTEPKAAKNTYTTERFIWLTKLNNLRILEQGSERPLTDTERATLMDEPYRKSKLTYAQARKLLELDDIAFFKGLRYGKDNAEASTLMEMKAYHAISRALEKEGLKDKKSPLNLSPELQDEIGTAFSLFKTDEDITGRLKDRIQPEILEALLKHINFDKFVQISLKALRRIVPLMEQGKRYDEACAEIYGDHYGKKNTEEKIDLPPIPADEIHNPVVLRALSQARKVINGVVRRYGSPARIHIETAREVGKSFKDRKEIEKRQEENRKDREKAAAKFREYFPNFVGEPKSKDILKLRLYEQQHGKCLYSGKEINLGRLNEKGYVEIDHALPFSRTWDDSFNNKVLVLGSENQNKGNQTPYEYFNGKDNSREWQEFKARVETSRFPRSKKQRILLQKFDEDGFKERNLNDTRYVNRFLCQFVADRMRLTGKGKKRVFASNGQITNLLRGFWGLRKVRAENDRHHALDAVVVACSTVAMQQKITRFVRYKEMNAFDGKTIDKETGEVLHQKTHFPQPWEFFAQEVMIRVFGKPDGKPEFEEADTPEKLRTLLTEKLSSRPEAVHEYVTPLFVSRAPNRKMSGQGHMETVKSAKRLDEGISVLRVPLTQLKLKDLEKMVNREREPKLYEALKARLEAHKDDPAKAFAEPFYKYDKAGNRTQQVKAMRVEQVQKTGVWVRNHNGIADNATMVRVDVFEKGDKYYLVPIYSWQVAKGILPDRAVVQGKDEEDWQLIDDSFNFKFSLHPNDLVEVITKKARMFGYFASCHRGTGNINIRIHDLDHKIGKNGILEGIGVKTALSFQKYQIDELGKEIRPCRLKKRPPVR

SEQ ID NO: 1103 - protein, 1082 aa, Neisseria meningitidis
MAAFKPNPINYILGLDIGIASVGWAMVEIDEEENPIRLIDLSVRVFERAEVPKTGDSLAMARRLARSVRRLTRRRAHRLLRARRLLKREGVLQAADFDENGLIKSLPNTPWQLRAAALDRKLTPLEWSAVLLHLIKHRGYLSQRKNEGETADKELGALLKGVADNAHALQTGDFRTPAELALNKFEKESGHIRNQRGDYSHTFSRKDLQAELILLFEKQKEFGNPHVSGGLKEGIETLLMTQRPALSGDAVQKMLGHCTFEPAEPKAAKNTYTAERFVWLTKLNNLRILEQGSERPLTDTERATLMDEPYRKSKLTYAQARKLLGLEDTAFFKGLRYGKDNAEASTLMEMKAYHAISRALEKEGLKDKKSPLRLSPELQDEIGTAFSLFKTDEDITGRLKDRVQPEILEALLKHISFDKFVQISLKALRRIVPLMEQGKRYDEACAEIYGDHYGKKNAEEKIYLPPIPADEIRNPVVLRALSQARKVINGVVRRYGSPARIHIETAREVGKSFKDRKEIEKRQEENRKDREKAAAKFREYFPNFVGEPKSKDILKLRLYEQQHGKCLYSGKEINLGRLNEKGYVEIDHALPFSRTWDDSFNNKVLVLGSENQNKGNQTPYEYFNGKDNSREWQEFKARVETSRFPRSKKQRILLQKFDEDGFKERNLNDTRYVNRFLCQFVADRMRLTGKGKKRVFASNGQITNLLRGFWGLRKVRAENDRHHALDAVVVACSTVAMQQKITRFVRYKEMNAFDGKTIDKETGEVLHQKTHFPQPWEFFAQEVMIRVFGKPDGKPEFEEADTPEKLRTLLAEKLSSRPEAVHEYVTPLFVSRAPNRKMSGQGHMETVKSAKRLDEGVSVLRVPLTQLKLKDLEKMVNREREPKLYEALKARLEAHKDDPAKAFAEPFYKYDKAGNRTQQVKAVRVEQVQKTGVWVRNHNGIADNATMVRVDVFEKGDKYYLVPIYSWQVAKGILPDRAVVQGKDEEDWQLIDDSFNFKFSLHPNDLVEVITKKARMFGYFASCHRGTGNINIRIHDLDHKIGKNGILEGIGVKTALSFQKYQIDELGKEIRPCRLKKRPPVR

SEQ ID NO: 1104 - protein, 1082 aa, Neisseria meningitidis
MAAFKPNSINYILGLDIGIASVGWAMVEIDEEENPIRLIDLGVRVFERAEVPKTGDSLAMARRLARSVRRLTRRRAHRLLRTRRLLKREGVLQAANFDENGLIKSLPNTPWQLRAAALDRKLTPLEWSAVLLHLIKHRGYLSQRKNEGETADKELGALLKGVAGNAHALQTGDFRTPAELALNKFEKESGHIRNQRSDYSHTFSRKDLQAELILLFEKQKEFGNPHVSGGLKEGIETLLMTQRPALSGDAVQKMLGHCTFEPAEPKAAKNTYTAERFIWLTKLNNLRILEQGSERPLTDTERATLMDEPYRKSKLTYAQARKLLGLEDTAFFKGLRYGKDNAEASTLMEMKAYHAISRALEKEGLKDKKSPLNLSPELQDEIGTAFSLFKTDEDITGRLKDRIQPEILEALLKHISFDKFVQISLKALRRIVPLMEQGKRYDEACAEIYGDHYGKKNTEEKIYLPPIPADEIRNPVVLRALSQARKVINGVVRRYGSPARIHIETAREVGKSFKDRKEIEKRQEENRKDREKAAAKFREYFPNFVGEPKSKDILKLRLYEQQHGKCLYSGKEINLGRLNEKGYVEIDHALPFSRTWDDSFNNKVLVLGSENQNKGNQTPYEYFNGKDNSREWQEFKARVETSRFPRSKKQRILLQKFDEDGFKERNLNDTRYVNRFLCQFVADRMRLTGKGKKRVFASNGQITNLLRGFWGLRKVRAENDRHHALDAVVVACSTVAMQQKITRFVRYKEMNAFDGKTIDKETGEVLHQKTHFPQPWEFFAQEVMIRVFGKPDGKPEFEEADTLEKLRTLLAEKLSSRPEAVHEYVTPLFVSRAPNRKMSGQGHMETVKSAKRLDEGVSVLRVPLTQLKLKDLEKMVNREREPKLYEALKARLEAHKDDPAKAFAEPFYKYDKAGNRTQQVKAVRVEQVQKTGVWVRNHNGIADNATMVRVDVFEKGDKYYLVPIYSWQVAKGILPDRAVVQGKDEEDWQLIDDSFNFKFSLHPNDLVEVITKKARMFGYFASCHRGTGNINIRIHDLDHKIGKNGILEGIGVKTALSFQKYQIDELGKEIRPCRLKKRPPVR

SEQ ID NO: 1105 - protein, 67 aa, Neisseria meningitidis
MFGYFASCHRGTGNINIRIHDLDHKIGKNGILEGIGVKTALSFQKYQIDELGKEIRPCRLKKRPPVR

SEQ ID NO: 1106 - protein, 220 aa, Neisseria mucosa
MRHIFSDGLKEGIETLLMTQRPALSGDAVQKMLGHCTFEPTEPKAAKNTYTAERFIWLTKLNNLRILEQGSERPLTNTERATLMDEPYRKSKLTYAQARKLLGLKDTAFFKGLRYGKDNAEASTLMEMKAYHAISRALEKEGLKDKKSPLNLSPELQDEIGTAFSLFKTDEDITGRLKTELTPASNKTLSRPFTVKSASNGSTSAPWLPSTKWFLHFKPA

SEQ ID NO: 1107 - protein, 392 aa, Unknown
  Neisseria sp. oral taxon 020 str. F0370
MAPFTLKPLNYILGLDIGIASVGWAVVETDSDVLPYRLIDVGVRTFDRAEVPKTGESPAAARRLARSVRRMIRRRAHRMLRARRLLKREGMLQAADFDAHGLVENLPVNPWQLRVDALSRKLMPLEWAAVLLHMVKHRGYLSQRKNERNSSDKELGALLSGVAANSEALQGGDFRTPAELAVNKFEKESGHIRNQRGDYSHTFNRKDVQAELVLLFEKQKEYGNPYISDGLLTGVEDLLMTQRAALSGDAVQKMLGRCTFEPEEYKAAKNTYSAERFVWLTKLNNLRILDQGSERPLTDSERAKLMDEPYKKTKLTYAQVRRLLELDDTAFFKGLRYSKDNAESATLMEMKAYHSISGALEKAGLKNKKIAAGLIARIAGRNRRGVFAIQNR

SEQ ID NO: 1108 - protein, 701 aa, Unknown
  Neisseria sp. oral taxon 20 str. F0370
MQDEIGEAFSLFKTDEDIRGRLKGKLPDEQLDALLEYVSFDKFVQLSLKALRKILPLMEQGKRYDEACAEIYGDHYGIKDDKQAQFLPPVSADEIRNPVVLRALSQARKVVNAVVRRYGSPARVHIETAREVGKSFLDRKKIEKRQEENRKDRERSIAKFREYFPNFVGEPKAKDILKMRLYEQQQGQCLYSGKAIDLRRLNEKGYVEIDHALPFSRTWDDSFNNKVLVLAGENQNKRNQTPFEWLGGDEKRWREFTARVEHCRFPRSKKQRILMQKLDEKDFKERNLNDTRYVNRFLCNFIAQNMLLTGEDKNRVFASNGQITNLLRGMWGLKKVRESNDRHHALDAVVVACSTVAMQQKITNYVRQKEMNVFDGEMVDKTTGEVSRLHFPQPWDFFRQEVMMRVFGKPDTPSENNEEADTPEKLRALLADKLSSRPEAVHEAVTPLFVSRAPSRKMSGQGHMETIKSAKRLSEGKSVLRVPLTQLTPKLLENMVNREREPQLYEDLLGRLNAHGGDPAKAFAAPFFKRDKAGNPTQQVKAVRVEDVQKSGVIVREGNGVADNATMVRVDVFEKGGKYYLMPIYTWQAAKGILPNKAVIAHTDEANWQEMDTSFTFKFALYPNDLVLASLKKETYFGYFAGLDRSTGNISLRVHDLEKSKGKDGVYRIGVKTALSFQKYQVDELGKTIRPCRLKKRPPVR

SEQ ID NO: 1109 - protein, 1089 aa, Unknown
  Neisseria sp. oral taxon 014 str. F0314
MTAFKPNPLNYILGLDIGIASVGWAMVEIDDKENPVRLIDLGVRVFERAEMPKTGDSLAAARRLARSVRRLTRRRAHRLLRARRLLKHEGVLKPEDFDENGLVKPLPYIPKQPRNTPWQLRAAALDRKLTPLEWAAVLLHLVKHRGYLSQRKNEGETDDKELGALLKGVADNTHALQAGNFRTPAELALNKFEKESGHIRNQRGDYSHTFSRKDLQAELVLLFEKQKEFGNPYVSDDLKNGIENLLMTQRPALSGDAIQKMLGHCTFEPAEPKAAKNTYTAERFIWLTKLNNLRILNQGNERPLTDAERTTLMDEPYKKSKLTYAQARKLLDLDDTAFFKGLRYGKDNAESATLMEMKAYHAISRALEKEGLKDKKSPLSLSPELQDEIGTAFSLFKTDEEITGRLKGCLQPEILDALLKHISFDKFVQISLKALRRIVPLMEQGKRYDEACAEIYGDHHGRRNSEETLYLPPIPADEIRNPVVLRALSQARKVINGVGRRYGSPARIHIETAREVGKSFKDRKEIEKRQEENRKDREKAAAEFQEYFPNFVGEPKSKDILKLRLYRQQNCKCLYSGKEINLGRLNEKGYVEIDHALPFSRTWDDSFNNKVLVLGSENQNKGNRTPYEYLNGKDNSREWQEFKARVETSRFPHSKKQRILLQKFDEEGFKERNLNDTRYVNRFLCKFVADHMQLTGKGKRRVFASNGQITNLLRGFWGLRKVRAENDRHHALDAVVVACSTVAMQQRITRFVRYKEMNAFDGKTVDKETGEVLHQKTHFPQPWEFFAQEVMIRVFGKPDGKPELEEADTPEKLRALLAEKLSSRPEAVHEYVAPLFVSRAPNRKMSGQGHMETIKSPKRLDEGISVVRVPLTQLKLKDLEKMVNREREPKLYEALKARLEAHKDDPAKAFAEPFYKQDKAGNRTQQVKAVRIEQVQKTGVWVRNQNGIADNATMVRVDVFEKGGKYYLVPIYSWQVAKGILPDKAIIAFKDEEEWQLIDDSFNFKFPLHPNDLVEVITKKARIFGYFASCHRGTGNINIRIHDLDNKVGKNGILEGIGVKTALSFQKYQIDELGKEIRPCRLKKRPPVR

SEQ ID NO: 1110 - protein, 1097 aa, Neisseria wadsworthii
MKKQPQRYILGLDLGIASVGWALILVDGAENPVGLLDCGVRTFERAEVPKTGDSLALARRQARSVRRLIRRRAHRLLRLRRLLKREGILSAADFNSDGLPNLPIDAWQLRVAGLERKLTNQEWAAVLLHLVKHRGYLSQRKSETQTENKELGRLLAGVAENSKLLSESSEQYRTPAELAVKLFAEQSGHLRNKGGEYTHTFNRLDLQKELHLLFERQYALGNPFASAELQSKVDELLMTQRSALQGEAVLKMLGKCTFEPSEYKAAKNTYSAERFIWLTKLNNLRILYNGEERALDEGDRKKLLDEPYKKAKLTYKQVRSILNLPESAVFKGLRYGKDSDGLKAENGTLMEMKAYHKIRTILDKAGLKGEWENRIRNPEILDKIGTAFSLYKTDEDIQAALADLRLPENVLDALLAGLNFDKFIQLSLKALRNILPLMERGIRYDEACKEVYGDHRALAESKNQVLLPPIPADEIRNPVVLRTLTQARKVINAIIRRYGSPQRVHIETARELGKSKQERDKIDRKNKENQNDRNRLASDIRKHFNFEPTPKDILKLRLYEQQHGKCLYSDLREEKGECLYTGNVIELHRLFEDGYVEIDHALPLSRTWDNSLNNKVLVLKSSNQNKGNKTPYEWLDGANNSRRWREFQARVQGCHFPYVKKQRIQTAKLDSKAEQGFLERNLNDTRYISKFMCQFITANLRLAETSNALMEEVAGENPYWKERKRQRVFAPSGSIIALLRGLWGLKKVREDNDRHHALDAIVVACSTVSMQQKITKAMQRRETLETVDSETGEVKTRIPQPWDFFRQEVMIRVFSDSPREELAEKLNSRPEALHDFVSPLFVSRAPNRKMTGQGHLETVKSAKRLSENISVVRKPLTALKLKDIENIVGYPDREPALYQALRERLLAHKDDPVKAFADKPFYKPAKDGGQGSLVKAVRIIENTKHGLKIRNGITDTNGDMVRTDVYQKTDKKGKRQYFIVPVYAWQVEKNELPTVDCKGYEIDDNYEFCFSLYKYDLIEIQNPNDINQELRAYYINCDSSDGRFWLAYHDKSAKEQQFRISTQNQPIIKKYQVDTLGKEIRLCKAEKRTALNGKKKK

SEQ ID NO: 1111 - protein, 1426 aa, Niabella soli
MPRKNILGLDLGTTSIGFAKIIEDDDYQCSSVELIGVRVNPLTTDEQTNFEKGKPVSVNADRTLKRGMRRNLDRYQLRRDYLIEILRTHHIITADTKLAEDGKNTTHTTYALRALAATAEIPLEAFVRVLLAINKKRGYKSSRKAKNEDEGQLIDGMAIARRLYEESLTPGQFSYQLLKEGKKYLPDFYRSDLNTELNKVWNFQKQFYPEILTDEFKRHLEGKGQRATAVAFWGQHGFSMAENKGSREEKKLHAYKWRSEAAHKQLTKEEVAFVITEINNDLNKSSGYLGAISDRSKELFFNKQTVGQYLHQQLKENPHTRLKGQVFYRQDYLDEFETIWEMQAKFYSALTLELKEEVRDVVIFYQRKLKSQMGLISLCEFESKEIEIEKNGEKAKKRIGLRVAPKSSPLFQEFKIWQVLNNLEFRNKKTKEVFVPEMAAKQQLFDELNIKGNLLASEAIKILGYKTKDWEANYHTLEGNRTNKSLYDAWLKILELEGYDENLLKLSGSDDIDVSKIEKPALEIRQMVLAVFEVLGISGAILDFDAEADGKAFEQQPAYQLWHLLYSAEDDGKKYSQEDIFTYGHDNIGLKKKLCEKFGFRPEHTKILVNVVFSDDYGNLSSKAMRRIYPFIKELTYDKACAEAGYRHSAASLTKEEIAARPLQNRLDLLKKNELRSPVVEKILNQMVNVVNTLVDDENQNRKARGLSEDFHFDEIRIELARELKKNAKERAEMTTNINTAKQSHEKIIRILQTEFGVPNPSRNDIVRYKLYEELKNNGYKDLYTNTYISRDILFSKQIDVDHIIPQMSLFDDSFSNKTVVFRKDNQDKGNKTAYDYILGKYGEQALEEYISRITSLFELGKKNKEEGIGKAKFQKLQKRLVDIGDGFIERDLRESQYIAKKANNMLYAICRSVVSTSGEITARLREDWDLVNVMQEINLPKFRALGLTEMVEKKDGAQKERITDWTKRNDHRHHAMDALAIAFTRHSHIQYLNHLNARKDEANKWHPVVSKIEEKETVLIYDDLGNRKRKFKAPMPNFREVVKEHLENVLISHKAKNKVVTKNKNKIKTVRGEKVKTELTPRGQLHKETIYGRYRYYESKEEKIGPKFDAEMIGMVTNPQYKKLLLERLAANGNDPKKAFWGKNALNKNPLYVDEARQELLPEKILLRWLNDDYSIRKDVTPENLKDIKTIEKILDKGVKKILLKRLADFGNDPKKAFSDLDKNPIWQNEAKRIAIKRVTISGIKNAAPLHHKKDHLGNDILDEKGKQIPSSFVSTGNNHHVAIYRDAEGNLQERVVSLFDAVQLVNGGEPVIDKEYNKGIGWQFLFTMKQNEMFVFPDEKTGFNPREVDLLSSGNRKLISPNLFRVQKLASKNYFFRHHLETSVEEKKELKNIAYKPQLGLNALSNIVKVRINHIGEIVSVGEY

SEQ ID NO: 1112 - protein, 79 aa, Nitritalea halalkaliphila
MPLRLPERVYKMISSTGAECHFLPVNVSSLIKGYDAKSKLGEFGSQNKQEVTSDSFIRVKERCYKLEINRLGIPLNRLK

SEQ ID NO: 1113 - protein, 1498 aa, Odoribacter laneus
METTLGIDLGTNSIGLALVDQEEHQILYSGVRIFPEGINKDTIGLGEKEESRNATRRAKRQMRRQYFRKKLRKAKLLELLIAYDMCPLKPEDVRRWKNWDKQQKSTVRQFPDTPAFREWLKQNPYELRKQAVTEDVTRPELGRILYQMIQRRGFLSSRKGKEEGKIFTGKDRMVGIDETRKNLQKQTLGAYLYDIAPKNGEKYRFRTERVRARYTLRDMYIREFEIIWQRQAGHLGLAHEQATRKKNIFLEGSATNVRNSKLITHLQAKYGRGHVLIEDTRITVTFQLPLKEVLGGKIEIEEEQLKFKSNESVLFWQRPLRSQKSLLSKCVFEGRNFYDPVHQKWIIAGPTPAPLSHPEFEEFRAYQFINNIIYGKNEHLTAIQREAVFELMCTESKDFNFEKIPKHLKLFEKFNFDDTTKVPACTTISQLRKLFPHPVWEEKREEIWHCFYFYDDNTLLFEKLQKDYALQTNDLEKIKKIRLSESYGNVSLKAIRRINPYLKKGYAYSTAVLLGGIRNSFGKRFEYFKEYEPEIEKAVCRILKEKNAEGEVIRKIKDYLVHNRFGFAKNDRAFQKLYHHSQAITTQAQKERLPETGNLRNPIVQQGLNELRRTVNKLLATCREKYGPSFKFDHIHVEMGRELRSSKTEREKQSRQIRENEKKNEAAKVKLAEYGLKAYRDNIQKYLLYKEIEEKGGTVCCPYTGKTLNISHTLGSDNSVQIEHIIPYSISLDDSLANKTLCDATFNREKGELTPYDFYQKDPSPEKWGASSWEEIEDRAFRLLPYAKAQRFIRRKPQESNEFISRQLNDTRYISKKAVEYLSAICSDVKAFPGQLTAELRHLWGLNNILQSAPDITFPLPVSATENHREYYVITNEQNEVIRLFPKQGETPRTEKGELLLTGEVERKVFRCKGMQEFQTDVSDGKYWRRIKLSSSVTWSPLFAPKPISADGQIVLKGRIEKGVFVCNQLKQKLKTGLPDGSYWISLPVISQTFKEGESVNNSKLTSQQVQLFGRVREGIFRCHNYQCPASGADGNFWCTLDTDTAQPAFTPIKNAPPGVGGGQIILTGDVDDKGIFHADDDLHYELPASLPKGKYYGIFTVESCDPTLIPIELSAPKTSKGENLIEGNIWVDEHTGEVRFDPKKNREDQRHHAIDAIVIALSSQSLFQRLSTYNARRENKKRGLDSTEHFPSPWPGFAQDVRQSVVPLLVSYKQNPKTLCKISKTLYKDGKKIHSCGNAVRGQLHKETVYGQRTAPGATEKSYHIRKDIRELKTSKHIGKVVDITIRQMLLKHLQENYHIDITQEFNIPSNAFFKEGVYRIFLPNKHGEPVPIKKIRMKEELGNAERLKDNINQYVNPRNNHHVMIYQDADGNLKEEIVSFWSVIERQNQGQPIYQLPREGRNIVSILQINDTFLIGLKEEEPEVYRNDLSTLSKHLYRVQKLSGMYYTFRHHLASTLNNEREEFRIQSLEAWKRANPVKVQIDEIGRITFLNGPLC

SEQ ID NO: 1114 - protein, 1389 aa, Oenococcus kitaharae; identical to SEQ ID NO: 236

SEQ ID NO: 1115 - protein, 1535 aa, Ornithobacterium rhinotracheale
MNTILGLDLGTNSIGWALIKVLNDKTRLPLEIIDLGVVVIPTDQRTLDKFSKGESISKTAERTKQKGVRKLYERKKLRRERLHRVLNILGFLPEHYSKKIDFKKHLGQFFGNSQPKISYVENDHGKHEFIFMDSYREMLKEFSKHNIKNVPYDWTIYYLRKKALSQKISKEELAWVILNFNKKRGYYQFRDDNADENKENKIEKYYALKVTNVKKEDAQNYTITLENGWIYKNKSKISLLDWVGSTKEFISTEKFDNKGNIIKKKNGEDDRTLKLVDSEKDWIAIKKSTEDRIENYGKTVGTYLYEHLLKDPNQKLNGELINIIDRKFYKNELKQILEKQKEFHPELLNEDLFQKSIIELYPKNSTRQKELKNKDLCYLLIDDVIYYQRDLKKKNSTINKCSFESREYYLNGEKQIQKINCIAKSKPLYQEFRTLQFIKNLKVYEIIDGLEKDITSKLLPDFETKEHFFEWLNDKEKIDQLQLLSYKCFDLHDNVKNDLIAKGIKRPTEKAIRTELLEKYRWNYSKDNDRNFLLNETRFKILKYLKKVDKKLTLTNEQIESLWLLLYSAKDERELKNGLQKFSEKNKLPKKFSDIFISFPPFKKEYGAYSEKALKKLLSLVRFGKYWSFNKIDNNIQNKIMNILNGEVDDSISDRVREKTILLQDKNDFQDLPLWLASYVAYNRFSEVSEIKYWDSPDKIEFLKQHSIGNPIVEKIINETLKLIKDIWVIHGKSCKNFFSEIHIELSREIKSSSKKRAQITNNNTKNQKLNNLIKSLLIEMASDTKYENVTPYSPSQQEILKIYDEGIYSKEENSEKIKEINKIRNNNKISKSDITKYKLWLEQGYISPYTGKIIPLTKLFTAKYQKEHIIPQTKFFDDSFNNKVICEAEVNKLKDNSLAMNFIKAKGGKAVKLSDGETVTILNQEEYKQLVRTSFKKNSIKLRNLLLEEIPDTFTKRQLNDTKYISKLVLSLLSNIVREKGELESTAKRIVSTNGQITSILRNDWGLNNIWNKLITPRFERLNNINKNKIYGNWENKKGKNVFQINYLNDNLSTLNTKRIDHRHHALDALIVACTTRNHINFLNNQYAKSRNQRHDLRAKLKRRETITTEGSKKQVFKDFIKPWESFTQDALKKLETTIVNFKVNKRIINKTINWYKKWEKQKDGTYKKIQKKQTKGDAWAIRKPLHIDTIYGIVCKKLPLKSALENYKNIIDENLKHKIKELKEVNKFDNNQIINFFKECNFIFEDNNIQKVEVYDFKDNRDKTILSSSRQLIDESFTPKKIGKVLDPTIRNILLKHLNSTKYNNKFDSDGNPIKPEKLAFSPEGLKDLNKNIKHLNNNKEHQPIKRVKLFETLGNKIKVGYTQQKNKKFAETATGTNLFLGIYSDNNKRDFKTIPLILAIQREKEGLNPCPDTDEKGNQLLFSLSPNELVFVPNNEERKNPNLVDFENLSKDQIDRIYKFVSCTGSEAYFVPSRTAKPIIENENGTNNKSQRIIEFNEKTSIKNEKNEPVLIKTICWKIEVNRLGKIIKVIK

SEQ ID NO: 1116 - protein, 103 aa, Parabacteroides merdae
MIVYRLFYRFLFKATKLVNFVIHKELKRQIARTGKIKFHSGGCGCQSGNYKMQNFEKGKSITTNADRTLKRSMRRNLYRCKLRRDVLIELLKKVGFIPEKQWK

SEQ ID NO: 1117 - protein, 82 aa, Parabacteroides merdae
MSIWKLQYPPLDLKIYNKFLVYSRVNPLTVDEMQNFEKGKSITTNADRTLKRSMRRNLQRYKLRRDVLIELLKKVGFMSEKQ

SEQ ID NO: 1118 - protein, 84 aa, Parabacteroides merdae
MSIWKLQYPPLDLKIYNKFLVYSRVNPLTVDEMQNFEKGKSITTNADRTLKRSMRRNLYRCKLRRDVLIELLKKVGFIPEKQWK

SEQ ID NO: 1119 - protein, 398 aa, Pasteurella bettyae
MLANENQNKGNLTPYEWLDGKNNSKRWQDFVARVQTCCFSHRKKQHILSHKLDEKSFIERNLNDTRYVARFLCNFIADNMLLTGKGKRKVFASNGQITALLRGRWGLQKVRDDNDRHHALDAVVIACSTVAMQQKITRFVKYEEGNVFSGERIDRETGEIIPLYFPTPWKFFKENVEIRIFSENPKLELENRLPDYPQYNHEFVQPLFVSRMPTRKMTGQGHMETIKSAKRLDEGISVLKVPLTQLKLADLENMVNRERELALYEALKERLELFGNDPAKAFIEPFYKKGGALVKAVRVKKVQKSGVLVRDGNGVADNALMVRVDVFTKGGKYFLVPIYTWQVAKGILPNKAVTANIDEIDWLEMDESYQFIFTMYPNDLVKVKLKKEEFFGYYGGLD

SEQ ID NO: 1120 - protein, 610 aa, Pasteurella bettyae
MNMLKPLNYILGLDLGIGSVGWAVVEIDEQGNPLRLIDVGVRTFERAEVAKTGESLALARRLARSSRRLVKRRAARIKKAKRLLKAENILLSVDEILPNDVWQLRVKGLDHKLERQEWAAVLLHLLKRRGYLSQRKNESKSENKELGALLSGVVTNHQILQTDEYRTPAEIAVHKFQAEDGHIRNQRGDYTHTFSRLDLLAEMELLFQRQTELGNLHTSSKLLENLTALLMWQKPALAGEAILKMLGKCTFEPTEYKAAKNSYSAERFVWLTKLNNLRILEQGAERALTDSERFVLLDQPYEKAKLTYAQVRTLLKLSDEAIFKGVRYQGEDKKTVESKTTLMEMKAYHQIRKALDGADLKDEWNTLKNDSALLDEIGTAFSLYKTDDDISHYLGGKLSEKVLNVLLENLNFDKFIQLSLKALQKILPLMLQGQRYDEAVSAVYGDHYGKKSAESCRLLPAIPANEIHNPVVLRTLTQARKVINAVVRLYGSPARIHIETGRKVGKSYQDRKKLEKQQEENREQRESAVKKFKEYFPNFVGEPKGKDILKLRLYELQQSKCLYSGKSFDPNRLLEKGYVEVDHALPFSRTWDDSFNNKVCLPMKTRIKAI

SEQ ID NO: 1121 - protein, 199 aa, Pasteurella multocida
MACATPSMQQKITRFIRFKEVHPYKIENRYEMVDQESGEIISPHFPEPWAYFRQEVNIRVFDNHPDTVLKEMLPDRPQANHQFVQPLFVSRAPTRKMSGQGHMETIKSAKRLAEGISVLRIPLTQLKPNLLENMVNKEREPALYAGLKARLAEFNQDPAKAFTTPFYKQGGQQVKAIRVEQVQKSGVLVRENNGVADNA

SEQ ID NO: 1122 - protein, 63 aa, Pasteurella multocida
MQTTNLSYILGLDLGIASVGWAVVEINENEDPIGLIDVGVRIFERAEVPKTGESLALSRRLAR

SEQ ID NO: 1123 - protein, 1058 aa, Pasteurella multocida
MQTTNLSYILGLDLGIASVGWAVVEINENEDPIGLIDVGVRIFERAEVPKTGESLALSRRLARSTRRLIRRRAHRLLLAKRFLKREGILSTTDLEKGLPNQAWELRVAGLERRLSAIEWGAVLLHLIKHRGYLSKRKNESQTNNKELGALLSGVAQNHQLLQSDDYRTPAELALKKFAKEEGHIRNQRGAYTHTFNRLDLLAELNLLFAQQHQFGNPHCKEHIQQYMTELLMWQKPALSGEAILKMLGKCTHEKNEFKAAKHTYSAERFVWLTKLNNLRILEDGAERALNEEERQLLINHPYEKSKLTYAQVRKLLGLSEQAIFKHLRYSKESAESATFMELKAWHAIRKALENQGLKDTWQDLAKKPDLLDEIGTAFSLYKTDEDIQQYLEGKLPDSVINALLVSLNFDKFIELSLKSLRKILPLMEQGKRYDQACHEIYGHHYGEKNQQISQLLPVIPTQEIRNPVVLRTLSQARKVINAIIRQYGSPARVHIETGRELGKSFKERREIQKQQEDNRTKRESAVQKFKELFSDFSSEPKSKDILKFRLYEQQHGKCLYSGKEINIHRLNEKGYVEIDHALPFSRTWDDSFNNKVLVLASENQNKGNQTPYEWLQGKINSERWKNFVALVLGSQCSAAKKQRLLTQVIDDNKFIDRNLNDTRYIARFLSNYIQENLLLVGKNKKNVFTPNGQITALLRSRWGLIKVRENNDRHHALDAIVVACATPSMQQKITRFIRFKEVHPYKIENRYEMVDQESGEIISPHFPEPWAYFRQEVNIRVFDNHPDTVLKEMLPDRPQANHQFVQPLFVSRAPTRKMSGQGHMETIKSAKRLAEGISVLRIPLTQLKPNLLENMVNKEREPALYVGLKARLAEFNQDPAKAFATPFYKQGGQQVKAIRVELVQKSGVLVRQGNGVADNAPGSIVRTDVFIKNNKFFLVPIYTWQVAKGILPNKAIVAHKNEDEWEEMDEGAKFKFSIFPNDLIELRTKTECFLGYYIGPDRHNGSISLREHDSEISKGNAGVYRVGVKLALSLEKYHIDELGKNRRICRPHQRRPVR

SEQ ID NO: 1124 - protein, 1056 aa, Pasteurella multocida
MQTTNLSYILGLDLGIASVGWAVVEINENEDPIGLIDVGVRIFERAEVPKTGESLALSRRLARSTRRLIRRRARRLLLAKRFLKREGILSTTDLEKGLPNQAWELRVAGLERRLSAIEWGAVLLHLIKHRGYLSKRKNESQTNNKELGALLSGVAQNHQLLQSDDYRTPAELALKKFAKEEGHIRNQRGAYTHTFNRLDLLAELNLLFAQQHQFGNPHCKEHIQQYMTELLMWQKPALSGEAILKMLGKCTHEKNEFKAAKHTYSAERFVWLTKLNNLRILEDGAERALNEEERQLLINHPYEKSKLTYAQVRKLLGLSEQAIFKHLRYSKENAESATFMELKAWHAIRKALENQGLKDTWQDLAKKPDLLDEIGTAFSLYKTDEDIQQYLTNKVPNSVINALLVFLNFDKFIELALKSLRKILPLMEQGKRYDQACREIYGHHYGEANQKTSQLLPAIPAQEIRNPVVLRTLSQARKVINAIIRQYGSPARVHIETGRELGKSFKERREIQKQQEDNRTKRESAVQKFKELFSDFSSEPKSKDILKFRLYEQQHGKCLYSGKEINIHRLNEKGYVEIDHALPFSRTWDDSFNNKVLVLASENQNKGNQTPYEWLQGKINSERWKNFVALVLGSQCSAAKKQRLLTQVIDDNKFIDRNLNDTRYIARFLSNYIQENLLLVGKNKKNVFTPNGQITALLRSRWGLIKIRENNDRHHALDAIVVACATPSMQQKITRFIRFKEVHPYKIENRYEMVDQESGEIISPHFPEPWAYFRQEVNIRVFDNHPDTVLKEMLPDRPQANHQFVQPLFVSRAPTRKMSGQGHMETIKSAKRLAEGISVLRIPLTQLKPNLLENMVNKEREPALYAGLKARLAEFNQDPAKAFTTPFYKQGGQQVKAIRVEQVQKSGVLVRENNGVADNASIVRTDVFIKNNKFFLVPIYTWQVAKGILPNKAIVAHKNEDEWEEMDEGAKFKFSLFPNDLVELKTKKEYFFGYYIGLDRATGNISLKEHDGEISKGKDGVYRVGVKLALSFEKYQVDELGKNRQICRPQQRQPVR

SEQ ID NO: 1125 - protein, 134 aa, Pasteurella multocida
MVNKEREPALYAGLKARLAEFNQDPAKAFTTPFYKQGGQQVKAIRVEQVQKSGVLVRENNGVADNASIVRTDVFIKNNKFFLVPIYTWQVAKGILPNKAIVAHKNEDEWEEMDEGAKFKFSLFPNDLVELKTKK

SEQ ID NO: 1126 - protein, 53 aa, Pasteurella multocida
YSKENAESATFMELKAWHAIRKALENQGLKDTWQDLAKKPDLLDEIGTAFSLL

SEQ ID NO: 1127 - protein, 1366 aa, Pediococcus acidilactici
MGDRKYNLGLDIGTSSIGFAAVDENNQPIRVKGKTAIGVRLFEEGKTAADRRGFRTTRRRLSRRRWRINLLNEIFDAHLAEVDPTFLARLKESNRSNLDPKKSFQGSLLFPERKDYQFYEEYPTIYHLRKALMEEDRKFDIREIYLAVHHIIKYRGNFLNGTPMRSFKVENIELDTLFDQLNQLYAEIVPDNELAFDLAQVADVKDVLSSTTIYKMDKKKQLVKMMLLPASNKALQSENKKIVTQFVNAILNYKFKLDVLLQVETDADWSLKLNDEGADDKLEEFTGDLDENRLEIIDLLQRLHNWFSLNEITKDGNSLSAAMVEKYENHHHHLGLLKKVIENHPDAKKAKALKETYTAYVGKTDDKTQNQDDFYKAVEKNLDDSPDAKEIKRLIQLDQFMPKQRTGQNGAIPHQLHQQELDQIIEKQSKYYPFLAEPNPNVKRRKDAPYKLDELIAFKIPYYVGPLVTPEEQAQNKENVFAWMKRKAAGPITPWNFDEKVDRMESANRFIRRMTTKDTYLFGEDVLPAESMIYQKFVVLNELNNLKINGRHLSLKDKQDVYNDLFKQQKTVSIKALQNYYVTKKKAATAPTVGGLADPKKFLSSLSTYIDFKNMFGERVNDPQFQEDLEQIVEWSTIFEDRGIFKAKLQALGWLSEKQIQQLVAKRYKGWGRLSKKLLTGLKNAEGYSILDEMWRSTENFMQIQTRPEFAALIQQANEKQFEGNDPNNVWENIESILGDAYTSPQNKKAIRQVVKVVQDIEKAVGNPPEKIAIEFTREAAANPQRTQSRLRTLEKLYESAEEVVDAGLTAELAEFKENKHVLSDKYYLYFTQLGRDVYTGDTISLDKLNDYDVDHILPQSFIKDDSLDNRVLTIRAVNNGKSDNVPAKMFGKKMGSFWRYLLDNGMISKRKYNNLITDPDNISKYAQKGFINRQLVETSQVIKLTANILNGIYDKDTEIIEVPAKMNSQMRKMFDLVKVREVNDYHHAFDAYLTIFIGKYLYKCYPKLRPYFVYGKFKKFGDNEDIEVGDGRFNFLNRIERLKNVTDPETGEILWSNVAPNETIKQIKKVYNYKFMLVSRETTTRRAELFNQTVYPKNYRGKLIPIKEDRPTDLYGGYSGNTDAYLAIVALEDKKKGKYFKVVGIPTRAAAKLEKLKQQDSQQYLQALHKVIAPQFTKSTKKGIKKTEFEIVLDKVHYRQLVQDGPVKMMLGSSTYKYNAKQLVLSEKALQVIADDRKFDETQKDDNLIAVYDEILSIVNQSFDLYDINGFRKKLNDNRDQFIDLPAETKYEGRKVVAHGKREMILEILKGLHANAAFGNLKPIGFSTAFGQLQVPNGIILSKNAILIHQSPSGLFERKIKLSDL

SEQ ID NO: 1128 - protein, 1229 aa, Pediococcus acidilactici; identical to SEQ ID NO: 125

SEQ ID NO: 1129 - protein, 270 aa, Pediococcus lolii
LFNQTIYSAKASKTMIPIKNDRPTKLYGGYSGNEDAYMSIIRLSDKKKTYKVVGISMRDASKLKAYENNAHEEYLKKLKEVIEQQFLDSGKKTKADFEIVIPKVNYHQRMQDGTKQFRIGSSKYVHNTKQLVLSEKTLKAIRNNKQYNGDAEKDLINAFDEILTIVNDSFSIFDIRSFRKKLNESRDKFVSLPVEDTKEKSKVIKGKRETLKQILIALHANGTSQDIPQLGLKSFGKMVKTGGLTLSENTALIHQSPSGLFEHKIKLSDL

SEQ ID NO: 1130 - protein, 1016 aa, Pediococcus lolii
MNGIFDAHLAEVDPTFLARLKESNRSNLDPKKSFQGSLLFPERKDYQFYKEYPTIYHLRKALMEKDRKFDIREIYLAVHHIIKYRGNFLNGTPMRSFKVENIELDTLFDRLNQLYEEIIPDNELAFDLEQVADVKEVLSSTTIYKMDKKKQLVKMMLLPASNKALQSENKKIVTQFVNAILNYKFKLDVLLQVETDADWSLKLNDEGADDKLEEFTGDLDENRLEIIDLLQRLHNWFSLNEITKDGNSLSAAMVEKYKDHRHHLELLKKVIEDHSDAKKAKALKETYTAYVGKTDDKTQNKDDFYKAVEKNLDDSPEAKEIKRLIQLDQFMPKQRTGQNGAIPHQLHQQELDQIIEKQSKYYPFLAEPNPNVKRRKDAPYKLDELIAFKIPYYVGPLVTPEEQAQNKENVFAWMKRKAAGPITPWNFDEKVDRMESANRFIRRMTTKDTYLFGEDVLPAESMIYEKFVVLNELNNLKINGRHLSLKDKQDIYNDLFKQQKTVSIKALQNYYVTKKKAATAPTVGGLADPKKFLSSLSTYIDFKNMFGERVNDPQFQEDLEQIVEWSTIFEDRGIFKAKLQALGWLSEKQIQQLVAKRYKGWGRLSKKLLTGLKNAEGYSILDEMWHSTENFMQIQTRPEFAALIQQANEKQFEGNDPDNVWENIENILGDAYTSPQNKKAIRQVVKVVQDIEKAVGNPPEKIAIEFTREAAANPQRTQSRLRTLEKLYESAEEVVDAGLTAELAEFKENKHVLSDKYYLYFTQLGRDVYTGDTISLDRLNDYDVDHILPQSFIKDDSLDNRVLTIRAVNNGKSDNVPAKMFGKKMGSFWRYLLDNGMISKRKYNNLITDPDNISKYAQKGFINRQLVETSQVIKLTANILNGIYDKDTEIIEVPAKMNSQMRKMFDLVKVREVNDYHHAFDAYLTIFIGNYLYKCYPKLRPYFVYDNFKKFGNKEDIGHKRFNFLGKIERDKKVVAPETGEILWSNVAPNETIKQIKKVYDYKFMLTSHETYTKHG

SEQ ID NO: 1131 - protein, 1333 aa, Planococcus antarcticus
MKNYTIGLDIGVASVGWVCIDENYKILNYNNRHAFGVHEFESAESAAGRRLKRGMRRRYNRRKKRLQLLQSLFDSYITDSGFFSKTDSQHFWKNNNEFENRSLTEVLSSLRISSRKYPTIYHLRSDLIESNKKMDLRLVYLALHNLVKYRGHFLQEGNWSEAASAEGMDDQLLELVTRYAELENLSPLDLSESQWKAAETLLLNRNLTKTDQSKELTAMFGKEYEPFCKLVAGLGVSLHQLFPSSEQALAYKETKTKVQLSNENVEEVMELLLEEESALLEAVQPFYQQVVLYELLKGETYVAKAKVSAFKQYQKDMASLKNLLDKTFGEKVYRSYFISDKNSQREYQKSHKVEVLCKLDQFNKEAKFAETFYKDLKKLLEDKSKTSIGTTEKDEMLRIIKAIDSNQFLQKQKGIQNAAIPHQNSLYEAEKILRNQQAHYPFITTEWIEKVKQILAFRIPYYIGPLVKDTTQSPFSWVERKGDAPITPWNFDEQIDKAASAEAFISRMRKTCTYLKGQEVLPKSSLTYERFEVLNELNGIQLRTTGAESDFRHRLSYEMKCWIIDNVFKQYKTVSTKRLLQELKKSPYADELYDEHTGEIKEVFGTQKENAFATSLSGYISMKSILGAVVDDNPAMTEELIYWIAVFEDREILHLKIQEKYPSITDVQRQKLALVKLPGWGRFSRLLIDGLPLDEQGQSVLDHMEQYSSVFMEVLKNKGFGLEKKIQKMNQHQVDGTKKIRYEDIEELAGSPALKRGIWRSVKIVEELVSIFGEPANIVLEVAREDGEKKRTKSRKDQWEELTKTTLKNDPDLKSFIGEIKSQGDQRFNEQRFWLYVTQQGKCLYTGKALDIQNLSMYEVDHILPQNFVKDDSLDNLALVMPEANQRKNQVGQNKMPLEIIEANQQYAMRTLWERLHELKLISSGKLGRLKKPSFDEVDKDKFIARQLVETRQIIKHVRDLLDERFSKSDIHLVKAGIVSKFRRFSEIPKIRDYNNKHHAMDALFAAALIQSILGKYGKNFLAFDLSKKDRQKQWRSVKGSNKEFFLFKNFGNLRLQSPVTGEEVSGVEYMKHVYFELPWQTTKMTQTGDGMFYKESIFSPKVKQAKYVSPKTEKFVHDEVKNHSICLVEFTFMKKEKEVQETKFIDLKVIEHHQFLKEPESQLAKFLAEKETNSPIIHARIIRTIPKYQKIWIEHFPYYFISTRELHNARQFEISYELMEKVKQLSERSSVEELKIVFGLLIDQMNDNYPIYTKSSIQDRVQKFVDTQLYDFKSFEIGFEELKKAVAANAQRSDTFGSRISKKPKPEEVAIGYESITGLKYRKPRSVVGTKR

SEQ ID NO: 1132 - protein, 211 aa, Porphyromonas catoniae
MGKKVLGLDLGVGSIGWCLITLDKDEKPQSILGMGSRIVPLSADDATEFTQGKAITKNKMRTVARTIRKGMDRYQLRREALKKVLREHAMLPDEALIKLPLLELWELRARAATPGEQVSLTELGRVLLHINQKRGYKHAKADEAAEAETKKGKETGYVAQVKGRYQILKEKGLTIGQHFAGELRANQQTAPRGTYYTYRIKEQVYPRVRGV

SEQ ID NO: 1133 - protein, 1009 aa, Porphyromonas catoniae
MRIIREAYIEEYDRIMAVQRVFYPELLTDALIGRIRDRIIFYQRPLKSCKQLVSFCEFEKKEKVIRVKHTNKEGVQELVEKTITIGPKVAPKSSPIFQVCKVWESIHNIRLYHPDGTERKLEQEEKQKLFDYLQRNDKLSLTTLRKELKIKPKDKLWCDKLLEKGIAGNTTAAILRKAFKGYEHYERLFRFDLVRRDSHEADEDGVIRPIIDESYQNEPLYKLWHILYSIEDRAEMRSALIGQLGIKAEDLDNGLMDALYKIDFVKQGYGNKSAKFICKLLPHLQEGKMYSEAAEAAGMRHSDSMTAQERDERNLLEEIPLLQKNALRQPVVEKVLNQMINLVNALKREHGEIDEVRVELARELKMSREEREKATKNNSSREKENKAIAERITEYGLTPTKSRIQKYRLWQESAESCIYCGKRVDVVQFLRGEETEVEHIIPKSILFDDSLSNKACACRSCNQEKGNRFAMEYIQAKGWEQDYIERVDSLFHDKKISYSKRQHLLMLPKDLPEDFIERHLRLSQYISREAQGILRKGIRLVSASEGGVTAKLRQLWGYDNILRDLNLERYKSMGETEVVTVEHRDGQRTDERIKDWSKRKDHRHHAIDALVVACTRQSYIQRLNRVNAEADRQEMDAFIKEQQQEHKLSKKEKLSLLENWLKEQPHFTTGEVKEHAEGILISFRPGKRTVSRGRNIYKRSGKTDVQRNVLIPRGALSEETVYGVISVDGENKVVCKYPLQKFLDTKETNVDKIADQAAEKIVDKVLREKIRERIKRYGKKEAFAEPLYLDEAQTQVVRSVRCFISKDQAKLIPLRYNDESEAVGFVAPGNNHHLALYRDASGKMRASVVSFFAAVERARYGIPMIVLNPRETREKARIIPDLPESIFSKLPEEDWVLEETLQEGEMVLLGMENDAIEEAIKKKDYSKLSRYLYRVQSLSYNDYKFCFHLETESEKKEKKKGEDKKRGEKAKNTAVMPPKRYRIRCLATYQEDLNPRKVKIDLLGRISLA

SEQ ID NO: 1134 - protein, 1197 aa, Unknown
  Porphyromonas sp. oral taxon 279 str. F0450
MLMSKHVLGLDLGVGSIGWCLIALDAQGDPAEILGMGSRVVPLNNATKAIEAFNAGAAFTASQERTARRTMRRGFARYQLRRYRLRRELEKVGMLPDAALIQLPLLELWELRERAATAGRRLTLPELGRVLCHINQKRGYRHVKSDAAAIVGDEGEKKKDSNSAYLAGIRANDEKLQAEHKTVGQYFAEQLRQNQSESPTGGISYRIKDQIFSRQCYIDEYDQIMAVQRVHYPDILTDEFIRMLRDEVIFMQRPLKSCKHLVSLCEFEKQERVMRVQQDDGKGGWQLVERRVKFGPKVAPKSSPLFQLCCIYEAVNNIRLTRPNGSPCDITPEERAKIVAHLQSSASLSFAALKKLLKEKALIADQLTSKSGLKGNSTRVALASALQPYPQYHHLLDMELETRMMTVQLTDEETGEVTEREVAVVTDSYVRKPLYRLWHILYSIEEREAMRRALITQLGMKEEDLDGGLLDQLYRLDFVKPGYGNKSAKFICKLLPQLQQGLGYSEACAAVGYRHSNSPTSEEITERTLLEKIPLLQRNELRQPLVEKILNQMINLVNALKAEYGIDEVRVELARELKMSREERERMARNNKDREERNKGVAAKIRECGLYPTKPRIQKYMLWKEAGRQCLYCGRSIEEEQCLREGGMEVEHIIPKSVLYDDSYGNKTCACRRCNKEKGNRTALEYIRAKGREAEYMKRINDLLKEKKISYSKHQRLRWLKEDIPSDFLERQLRLTQYISRQAMAILQQGIRRVSASEGGVTARLRSLWGYGKILHTLNLDRYDSMGETERVSREGEATEELHITNWSKRMDHRHHAIDALVVACTRQSYIQRLNRLSSEFGREDKKKEDQEAQEQQATETGRLSNLERWLTQRPHFSVRTVSDKVAEILISYRPGQRVVTRGRNIYRKKMADGREVSCVQRGVLVPRGELMEASFYGKILSQGRVRIVKRYPLHDLKGEVVDPHLRELITTYNQELKSREKGAPIPPLCLDKDKKQEVRSVRCYAKTLSLDKAIPMCFDEKGEPTAFVKSASNHHLALYRTPKGKLVESIVTFWDAVDRARYGIPLVITHPREVMEQVLQRGDIPEQVLSLLPPSDWVFVDSLQQDEMVVIGLSDEELQRALEAQNYRKISEHLYRVQKMSSSYYVFRYHLETSVADDKNTSGRIPKFHRVQSLKAYEERNIRKVRVDLLGRISLL

SEQ ID NO: 1135 - protein, 1422 aa, Prevotella denticola
MTQKVLGLDLGTNSIGSSVRNLDLSDDLKGQLEFFSSDIFRSSVNKESNGREYSLAAQRSAHSRSRGLNEARRRKLWATLDLLIKYGFCPMSPESLMRWRTYDKQRGLFREYPIDDKNFNAWILLDFDGDGKPDYSSPYQLRRELVIRQFDFDQPIERYKLGRALYHIAQHRGFKSSKGETLSQQETNSKQSLTDDTADVAGEMKASEEKLSKGLSTYMKENNLLTVGAAFAQLEDEGVRVRNNNDYRAIRSQFQREIETIFKFQQGLSVENELYERLVSEKKNIGTIFYKRPLRSQRGNVGKCTLERTKPRCAIGHPLFEKFRAWTLINNIKVRMSEEEQAEQLPMKLRFELYNDCFLAFVRAEFKFEDIRKYLEKRLGVHFSYNDKTINYKDSTSVAGCPITARFRKLLGEDWESFHVDGQKQRQAHGKNNASFHTVSYSTNDIWHFCYDAEEPEAVLSFAQDNLKWEKKKAEELVRIWSAIPQGYAMLSQKAIRNINKMLILGLKYSDAVLLAKVPEIVEITDGEILSVTEDYHRVEAQVGYEKQINNIVNALIAKYKSASEEYRFADHNYEYQLDKSDEKDIIKQIESNIGTRKWSLLDADEQTDILQKVRDKYQNFFRSHERKFVESPKLGECFEEYLMKKFPMVEGERWKKLYHPSQIAIYRPVPANKDRSALRLGNPDIGAIKNPTVLRVLNTLRKRVNQLLDDGIISPDETRVVVETARELNDANRKWALDTYNRIRHDENEKIKKILAEFYPKRDNISTVDIDKARYVIDQREMDYFTEAKTYHKDIKKYKLWLEQGGQCMYTGRTINLSNLFDPNSFDVEHTIPESISFDSSDMNLTLCDAHYNRFIKKNHIPADLPNYDKSVVIDGKEYSPIKPRLQRWADRVERLNRNVEYWRGQARRAQNKDRKDQCMREMHLWKMELEYWTKKLERFTITEVTDEFKNSQLVDTRVITRHAVLYLKSIFPHVDVQRGDVTAKFRKILGIQSVDEKKDRSLHSHHAIDATTLTIIPGAAKRERMLELFAKIEEVNKMLSFSGNEDRTGLKQELDGLKNQLNKEVKACRIGHNVSEIGTFINDNIIINHHVKNQALTPVRRRLRKRGHIVGGMDNPRWQTGDALRGEIHKASYYGAITQYAKDKEGKVLMKEGRPQINPTIKFVIRRELKYKKSSTDSGFASWDDLGKAIVDKELFALMKGQFPEGTSFKDACEQGIYMIKKGKNGEVDTKLYRIRHIRCKTKQKNALKIKEQAYKSEKEYKRYFYAAVGDLYAMCCYTNGKTREFKIYSLYDISCHRKVGVEDIPEFITDKKGNRLMLDYKLHTGDMILLYKENPEELYDLDNVSLSKLLYKINGFENDGLRIRMVNHLVAKEAMGESVKDYAKLPDIIRCGVKTIKFLVMGENRDFVIKNGKISFNHR

SEQ ID NO: 1136 - protein, 443 aa, Prevotella disiens
MELDYWKGKYNRFTMTEIPEGFSRRQGMGIGLISRYAGLYLKTIFHKKDNPQKSNVYIVKGSITAEFRRIWNIQDDYEKKCRDNHIHHCIDAIVVGCIGKREYDLMAQFYRDEEKYRWEKKKKPFFKKPWETFTQDMLSLKDEVLTVHFNPSNFTKKAHKKVFTPKGIFVAQGDCARVKLHKESYFGAIEQKGEIKYVMRKELSALKIEDIKNIVDAVVKEKVLAVVKKKGFKQAMAEPIYMNEDKRILIKKVRLFVSQTNPLIVKKHRDLSSKEYKQNYYVDNEGNLMIAMYEGVKKNGKIDREITVVNNLEAAKFFRQSQKNNAEKQLISHLSPKNGYPLKTVLTQKQLVLMYEDSPKEIKLRDTKNMVKRLYQVVEIEKDGRVKLKFHQEARSEGLNKNSAAFKIQDTPESLYRHTKSNLKVLVNGVDFKINILGEISLI

SEQ ID NO: 1137 - protein, 1375 aa, Prevotella histicola
MKKILGLDLGTTSIGWALVYESENTDEKSSIVRLGVRVNPLSVDEKGNFEKGKAITTNADRQQTHGARINLQRYKLRRENLKDCLQKQGWIGTEALCEEGKTSTFETYMLRAKAAEEEISLHELCRVLFMMNKKRGYKSNRKANNKEDGKLFDGMTVAKKLYEEHLTPAEYSFQLLSSGKKFKQEYYRSDLKEEFDRIWNEQQKYYPEILTDDFKQQLQGKSKGNTSKIFLGKYGIYSADLKGLDRKLQPLKWRVEALKQQVDKEVLAFVISDLNGQIASTSGLLGAISDRSKELYFNKQTVGQYLWTSLKETPHVSIKNKPFYRQDYLDEFEKIWETQATYHKELTPELKQEIRDIIIFYQRPLKSKKGLISVCELEQRKVKVTIDGKEKEISIGPKVAPKSSPMFQEFRIWQNLNNILLIDKGNNSIHPLYEEEKNLLYEELSVKEKLSKAEALKVLNKNSKQWDLNYKEIEGNRTQAVLYDCYNRIIVMTGHEEYNFKKLKASEIRSYVKTTFTGLGFNTDILEFDSSLTGHELEKQPMYQLWHLLYSYESDNSRTGNDALLRKLETAFGFPKEYAAVLSDVVFEDSYGNLSVKAMRKILPHLQAGLNYSQACEEAGYKHSRRSLTKNELDQKEYKEKLELLPKNSLHNPVVEKILNQMINVINAVIDEYGKPDEIRIELARELKIGAAERENMTRSINQGNAENKRIREILEKEFALSYISRNDIIKYKLYEELKSNGFKTLYSDTYISKDKLFSKDFDIEHIIPKARLFDDSLSNKTIEARDVNIAKSNKTAFDFISEKYDQQGIEAYKKKLDILLQDGSISKAKYNRLLMKEADIPSGFIDRDLRDTQYIAKKAYEILSDLVRNVTPTTGAVTSRLREDWQLVDVMKELNFEKYQKLGLVEVIEDRDGRKIKRIKDWTKRNDHRHHAMDALTIAFTKPSYIQYLNNLNARSDKNSSIYGIENKELHREDNKLRFNAPLPINEFRAEARRHLKSILVSVKAKNKVMTQNVNVIKTKHGVIKKVQLTPRGELHNATFYGTKKRPIIKMVKVGAALDEVTIKKVSSSFIREALLDRLHEYNGDAKKAFTGRNSIDKNPIYIDEEHKKTVPALVKTIEWEMYHPTRKLISPDLKIDKVIDKGIREILKTRLAKFNGDAQKAFSNLDENPIYKDEAKKITLKRVSLEGVSSVIPLHTLKDREGKLVVGKDGKPVLGDYVQTSNNHHIAFYMDENGNLQDNVVSFFEAAERKSQGVPVIDKNYNHDKGWNFLFTMKQNEYFVFPNEVTGFNPSEVDLMDEANYSIISPNLYRVQKMSKASGRDYWFRHHLEAMLNDDPKLRNSMFKRITSLKALEGIVKVRINCIGKIVAVGEYD

SEQ ID NO: 1138 - protein, 1380 aa, Prevotella intermedia
MKRILGLDLGTTSIGWALVNEAENNNEASSIVRLGVRVNPLTVDEKSNFEKGKAITTNADRQLRHGARINLQRYKLRRQNLHDCLQKQGWLGTEAMYEEGKASTFETYKLRAKAAEEEISLHEFARVLFMLNKKRGYKSNRKANNKEDGQLFDGMTIAKKLYEEHLTPAEYSLQLLNKGKKFTQGYYRSDLNAELERIWDEQKKYYPEILTDEFKQQLEGKTKTNTSKIFLAKYGIYSADLKGLDRKFQPLKWRVEALQQQVDKEVLAFVISDLKGQIANTSGLLGAISDRSKELYFNKQTVGQYLWASLEENPHISIKNKPFYRQDYLDEFEKIWETQAAFHKQLTPELKQEIRDIIIFYQRPLKSKKSLISVCELEQRKVKATIDGKEKEITIGPKVAPKSSPVFQEFRIWQNLNNVLLIDNDTNEKRPLDEVERNLLYKELSIKAKLSKTEALKILNKKGKQWDLNYRELEGNRTQAILFDCYNRIITLTGHEECDFKKIKASEIRHYVSTIFKNLGFSTEILDFDPSLKKHELEKQPMYQLWHLLYSYESDNSRTGNESLLRKLETTFGFPEEYATVLCDVVFEEDYGNLSVKAMREILPYLQAGNDYSQACAYAGYNHSRHSLTKEELDQKVYKERLELLPKNSLRNPVVEKILNQMINVINAIIDEYGKPDEIRIEMARELKSSAADRKKTTHAISQGNAENQRIREILEKEFSLSYISRNDIIKYKLYEELEPNYYKTLYSDTYITKDKLFSKDFDIEHIIPKARLFDDSFSNKTLEARNINLEKSNKTAFDFIKEKYGEDGAEAYKKKLDMLLENDAISRPKYNNLLRAEADIPSDFINRDLRNTQYIAKKACEILGELVKTVTPTTGKITNRLREDWQLVDVMKELNFEKYEKLGLTEIVEDRDGRKIKRIKDWTKRNDHRHHAMDALAIAFTKPSFIQYLNNLNARSNKGDSIYAIENKELHYEEGKLRFNAPIPVNEFRAEAKRHLSAILVSIKAKNKVMTQNVNKIKTKHGIIKKIQLTPRGPLHNETIYGTKMRPIIKMVKVGAALDEATINKVSSPAIREALLKRLNEYSGNAKKAFTGKNTLEKNPIYLNAGRTKTVPSLVKTVEWESFHPTRKLIDKDLNVDKVVDKGIREILKARLEEFNGDAKKAFSNLEENPIYLDEAKKIALKRVSIEGVLSAIPLHTLKNQAGKPITGKDGKPVLGNYVQTSNNHHIAFYYDEDGNLQDNAVSFFEAAERKSQGIPVIDKDYNRDKGWRFLFTMKQNEYFVFPNEATGFIPSEVDLTDEANYGIISPNLYRVQKVSRIDKGTSASRDYWFRHHLETILNDDAKLKNLAFKRIRGLLELKDIIKVRINSTGKIVAVGEYD

SEQ ID NO: 1139 - protein, 129 aa, Prevotella multiformis
MQKGGTGCKINRQTVGNVEVNVLNLRLYDRTDDREVTAGYLPTKEDYVRLFVYLNDRKEINQDTLLKDYFRLKKVKCGNEKEFAIRWNYIEDKEKKYPCNETRHELLAALDRAGMEHGWLDDSGTSARW

SEQ ID NO: 1140 - protein, 535 aa, Prevotella multiformis
MVKGLLSNIVRTAEEREETSKFVISCTGRITDRLKQDWGLNDVWNSLVYTRFKRLNELTETEAFGHWQDKDRRVFQTSVPLELQRGFSKKRIDHRHHAMDALVIACASRNIIGYLNNESAESPEKREDLRRKLCDKNHIIRKPWESFTQDARAALEDIVVSFKNYVRIINKATNYYERYDADGRKTKAEQKGGEMWAVRKPMHEATYYGKVNLRRKERVSLKAALEDIPSICNRDLRDYINGLVEKHFNKEQVLAQFRSVGNRWNKQHIDKVDVWRFSDGKEEMVATRKPLDTSFDAKRIEAVTDTGIQRILSNYLEAKGGDPKIAFTPEGIADMNQHITAYNNGKQHKPILKVRVSTKLGKKYPVGQTGCKAGQFVVAEAGTNLYFAVYEDGEGNRSYDTIPLNEAVECLKQGLPPVPETREKGDRLKFYLSPNDLVYVPAGDEENEIDRERIYKFVDSSGTTANFIPHRTAGLIYNVDKKLAEALCNGSIIQNEYGVGSQQSKNQKALTGEMVKAVCWKLEVDRLGNILRIIK

SEQ ID NO: 1141 - protein, 1380 aa, Prevotella nigrescens
MKRILGLDLGTTSIGWALVNEAESNNEASSIVRLGVRVNPLTVDEKSNFEKGKAITTNADRQLRHGARINLQRYKLRRQNLHDCLQKQGWLGTEAMYEEGKASTFETYKLRAKAAEEEISLHEFARVLFMLNKKRGYKSNRKANNKEDGQLFDGMTIAKKLYEEHLTPAEYSLQLLNKGKKFTQGYYRSDLNAELERIWDEQKKYYPEILTDEFKQQLEGKTKTNTSKIFLAKYGIYSADLKGLDRKLQPLKWRVEALKQQVDKEVLAFVISDLKGQIANTSGLLGAISDRSKELYFNKQTVGQYLWASLEENPHISIKNKPFYRQDYLDEFEKIWETQATFHKQLTPELKQEIRDIIIFYQRPLKSKKSLISVCELEQRKVKATIDGKEKEITIGPKVAPKSSPVFQEFRIWQNLNNVLLIDNDTNEKRPLDEDERYLLYKELSIKAKLSKTEALKILNKKGKQWDLNYKELEGNRTQAILFDCYNRIITLTGHEECDFKKIKASEIRHYVSTIFKNLGFSTEILDFDPSLEKHELEKQPMYQLWHLLYSYESDNSRTGNESLLRKLETTFGFPEEYATVLCDVVFEEDYGNLSVKAMRKILPYLQAGNDYSQACAYAGYNHSRHSLTKEELDQKVYKERLELLPKNSLRNPVVEKILNQMINVINAIIDEYGKPDEIRIEMARELKSSAADRKKTTHAINQGNDENQCIREILEKEFALSYISRNDIIKYKLYEELKPNGFKTLYSDTYIPKDKLFSKDFDIEHIIPKARLFDDSYSNKTLEARDINLAKSNKTAFDFVKEKYGEQGAEAYKKKLDMLLGNNVISKPKYNKLLMTEADIPSDFINRDLRNTQYIARKACEILGELVRTVTPTTGKITNRLREDWQLVDVMKELNFEKYEKLGLTEIVEDRDGRKIKRIKDWTKRNDHRHHAMDALAIAFTKPSYIQYLNNLNARSNKGDSIYAIENKELHYEEGKLRFNAPIPVNVFRAEAKRHLSAILVSIKAKNKVMTQNVNKIKTKHGIIKKIQLTPRGPLHNETIYGTKMRPIIKKVKVGAALDEATINKVSSPAIREVLLKRLNEYSGNAKKAFTGKNTLDKNPIYLNAERTKTVPASVKTVEWENYHPIRKPITPDLKVDKVIDKGIGEILKARLEEFNGDAKKAFSNLEENPIYLDQTKKIALKRVSIEGVLSTIPLHTLKNQAGKPIMGKDGKPVLGNYVQTSNNHHIAFYYDEDGNLQDNAVSFFEAAERKSQGISVIDKDYNRDKGWRFLFTMKQNEYFVFPNEATGFIPSEVDLTDEANYGIISPNLYRVQKMSRIEKGTSVSRDYWFRHHLETILNDDSRLKNSAFKRINSLKPLEGIIKVRINSIGKIVAVGEYD

SEQ ID NO: 1142 - protein, 1506 aa, Prevotella nigrescens
MKTILGLDLGPNSIGWAKVEVDDEGNYLRNIKLGSRIIPMTQDMLGDFDKGVKVSQTAIRTDFRGNRRLIERHLLRRERLHRVLHALKFLPKHYEDAIGWDRNEPATYGKFVNNSEPKLAWERQEDGSMRFLFMESFNEMVADFAQNQPSLVSDGKKIPLDWTIYYLRKKALTRPIKKEELAWILLNFNQKRGYYQLRGEEEEDNLTKRKEYYKLKVVGVEADGAPKGGKTWYNIHLENGWTARCQSKIPLDDWVGKVKEYIVTTEYEDDGKTPKCDKEGKVKRSFKSPEKDDWQLIKTRTEKFIDDSNKTVGAFIYDYLLEKPFDKIRGKYIRTIERKYYKNELREILREQTKYHEGLHSLEALKICAEELYKNNQQHQEYLLKKDMTFLLLNDLIFYQRPLKSKKSLIADCPYEVYKYDDKLTGKKGQKKIKCIAKSNPYYQEFRLWQFIANLRLFSVTDGKEVTAEYLKTEEDYVRLFSFLNDRKDIKQETFLRSFLKLKKESIGSEKIYPIRWNYIEDANKSYPCNATRHELLLAFDRADIPRELLDVEEREYRLWHLLYSIEAKEETESALRKLKANKAFGDLNIDDAFVNSFLKIKPFEKEYGAYSEKAIKKLLAVMRRGSLWKEADICEATKQNIAKILQNDIDEKLKKKIEAAVSSFNKLSDFQGLPTWLACYVVYGRHSEAAQIQCWQSPEDLKTYINKFKQHSLRNPIVEQCLLETLRTVYDIWKDAGQIDEIHIELGRNMKSTAEQRARKTKDILRNENTNLRIKNLLVELKNDDKIENVRPYSPSQQEILRIYEEGALQELSKEDEMFEDISKISKMAQPSPTELSRYKLWLEQKYRSPYTGRVIPLSKLFTTAYQIEHIIPQSRYFDDSFNNKVICESEVNSLKDNMLGYEFIKECGGRIVHCTLLGDVKIFTKEEYKDFVTKHYIDNTYKRDKLLLEDIPQEFSARQLNDSRYISKMVQTVLSNIVRAENEQEATSKFVVSCNGAITNRLKKDWGLNDVWSSIVCPRFKRLNEITKTNAFGHWEDKAGKHVFQTTVPLELQRGFSKKRIDHRHHAMDALVIACASRNIVNYLNNESANSPEKREDLRKKLCDEKRKIRKPWKTFTQDAREALSDVVVSFKNYVRVINKATNYYEHYSSSGNKVMISQKGNDMWAIRKPLHKESVFGRVNLCRKVIVSLKKALENIPAICDKTLRDYINALVEKHFNTRQLLAHFKSINYRLNRQCVEKVEVWQFSDEKIEMVARRKSLDTSFDDKQISSITDTGIQKILLNYLQTKDGNAEIAFTPEGIEEMNKNISLYNDGKAHQPILKVRVATPKGMKYPVGQTGNKATKFVVAEKGTNLYFAIYENELGVRSYDTIPLNIVVERLKEGLSPVPQANEADIPLKFYLSPNDLVYVPTKENEDELCRDRIYKFVDSSGTTANFVPHTSANTIYNVDKEYAEKCCNGAVFLNEYGLGSPQSKNQRALTGEMIKEICWKLKVDRLGNIIKVIK

SEQ ID NO: 1143 - protein, 774 aa, Prevotella oulorum
MEQCILETLRTVYDIWKEAGQIDEIHVELGREMKQTAEQRAHLTEKVLRNENTNLRIKSLLMELKNDADMKDVRPYSPMQQEILRIYEEGALQTLSKDDAAFTEIMKISKMAQPSASELQRYRLWLEQKYRSPYTGKPISLSKLFTSAYQIEHIIPKKRYFDDSFSNKVICEAEVNGKKDSMLAYEFIKDCGGDVIHCTTLGDVTILSEAEYKALVTELYANNKSKKDKLLMEDIPQDFINRQLNDSRYISRVVMTLLSNIVRIEGEEEATSKFVIPCSGGITDKLKKDWGLNDVWNNIVYPRFERLNALTNTSDFGQWENKEGKRVFQTSVPLELQRGYQKKRIDHRHHAMDALVIACASRKIINYLNNQEANDPTKQENARKQLCIKSRIIRKPWETFTQDAYKALDNIVVSFKNYVRVINKATNYYERYNADGKKAVDEQKGEAMWAIRKPMHKDTVFGHVNLRRKAVVKLKDALENIPAICDKTLRHYIQDLQKKHFNTKQLLAHFKSINYRLNKQAVDKVEVWQYSDDKEQLAATRKPLGPSFDAKCIAAITDTGIQKILLNYLQAKGGDPAIAFTPEGIAEMNQNIAVYNGGKQHQPILKVRIAKPMGKKFPIGQTGNKAFQYVIAEEGTNLYFAIYEDEEGNRTYDTIALREVVERLKQGLTPVPEKNEKGVALKFHLSPNDLVYVPTADELLSKVCSLDKNRIYKMVSATKSECLFIPHSVAKTIYDKVEFEALNKMGRALTGEMIKSVCWKIEVDRLGHIVNIIK

SEQ ID NO: 1144 - protein, 691 aa, Prevotella oulorum
MKTILGLDLGTNSIGWAKVIVDDNENYLRDIQLGSRIIPMSQDVLGKFDKGVTESQTAIRTSFRGVRRLRERTLQRRERLHRVLHTLHYLPPHYDSAIGWDRKTPTTYGKFLNHGEPKLAWERREDGTMQFLFMDAFHEMIADFAKYQPALVADGKKVPLDWTIYYLRKKALTQPIKKEELAWILLNFNQKRGYYQLRGEEDEENAAKHEEYHELKVVGVEVDEAGKGDNTWYNVKLENGWTYHRQSKIPLDDWVGKVRAFIVTTEYEKDGTTPKKDKEGNVKRSFRSPDEKDWGLRKKQTEHSLEASGTPVGAFIYDHLLKEPSDKIRGKFIHTIERKYYKQELAAILREQSKHHEKLCSKDMLKACIEELYPNNPLHRESLLKKDMPYLLIEDLIFYQRPLKSKKSLIAECPYEAYSYVDKETGEMKRQGIKCIAKSNPYYQEFRLWQLIANLRLRNRSDERDVTAEYLPHQEDYVRLFTYLNDRKEINQETLLKDFFKLKKVTIGGEKVFPIRWDYIEDKEKKYPCNATRHELLLALDRAGIEHDWLNDRDLAYRLWHLLYSVDSKDETERALRKLKDDDAFVESFLKIKPFEKEYGAYSEKAIKKLLPVMRRGSLWNEADLCPSTKERIANILQGTIDEKLKKKIGAFISSCQQVSDFQGLPEWLACYVVYGRHSEATDIQRWETPE

SEQ ID NO: 1145 - protein, 242 aa, Prevotella saccharolytica
MKLVLGLDLGVGSVGWALIFITDSGEPIKILALGERIVSMDSNNSNEFSAGATCTLNQKKTKAKSVRKGYSRYVQRRDALTAELRHIGMMPDETLIKLPVLDLWQLRANAATEGKKLSLAEIGRVLYHINQRRGYKHGKSDVSSDNKQKGYVKAVNERYCMIQERQQTIGQYFALKLKETAVTTEKGTFYTFRIKDQVFPREAYEEEFVVAYSTKVLKFKQITTLLNVVICLMMLLLIVQRY

SEQ ID NO: 1146 - protein, 1174 aa, Unknown
  Prevotella sp. oral taxon 317 str. F0108
MEFHPELCDAELLKACAEELYRNNEAHRAQLLAKDFKHLLVEDVLFYQRPLKSKKSLIANCPYETRQYINKETGEIKDVNVKCIAKSNPYFQEFRLWQWISNLRLLRQADGQDVTAAYIKGNEDKERLFDLLNNQGEIKQEHILRDFLKLKKPKGGEFPLRWNYVDDKIYPANETRHAINKAIKGMAVDKEEKETLGQLLDQPAVAYMLWNLLYSITDRNELARALRRFALTHGVSSVDAFVESFLKVKPFKKEYGAYSEKATKKLLQVMRLGKYWCGDELPEPAKRTKGNKQAVYDEMAHRGICKQTLQNISNIIEENIDERLMGALLNPERPLTELSHFQGLSVSDACYVVYGRHSEVAEIVKWKDADELNTFINNFKQHSMRNPIVEQCVLETLRTVRDVWEQEGQIDEIHVELGRNMKRTAEQRARDTQAIQRNENTNMRISLLLTELKNDPSISDVRPYSPSQRELLKIYEEGALENLTNQDEDIAKISRLAQPSASELRRYKLWLDQKYVSPYTGRPIPLAKLFTPAYEIEHIIPQSRYFDNSFSNKVICEAEVNKLKDNLLGMEFIKKFGGKTKGILDEEAYKLHVTTNYAHNPAKRSKLLMEDLPTDFNSRQLNDTRYISKTVMALLSNVVREEGERETRSKHVVVCTGGVTDTLKKDWGLHDVWHNLVYPRFIRLNNLTGSQNFGYWRYLNEENSKKGEDSKKVFQITLPPECQRGFVKKRIDHRHHAMDALVIACASANIVNYLNNQSAANPHIHENLQRLLCDRKREIRKPWPTFTQDAQAALKDLVVSFKNTVRVVNKASNTYLRYDKDGKKKRFKQEGEGLKAIRKPMHKETYYGEVNLIRKEMVPLKRALDDVNAIVDKELRASIKGLLRDGFNPQQVLANFKAKDFKFDKRDIKKVEVYVSSEKSTPMVATRKSLDTSFNAKRIADITDTGIQKILLNYLKANDNSPEQAFTPEGIAYLNEHIAEYNDGKPHQPILKVRVSEVKGAKFAVGQTGSKKDKFVEAQSGTNLYFAIYEDKEGKRHFETIALKVAAERLKDKQMPVPEINDAGLPLKFYLSPNDLVYVPTDEDRATAHPSIDKMRIYKMVSATDRQCFFLPFTVASVISNKVEFEALNKMERVLDASEYSSAYDSSHVNKVMVKNVCWKLEVDRLGNITKIVR

SEQ ID NO: 1147 - protein, 992 aa, Unknown
  Prevotella sp. oral taxon 472 str. F0295
MITRILGLDTGTNSLAWAVVDRDANGNYTLVKRGDVIFTEGVKIEKGIESSKAAERTAHKALRVHYSRRRLHKIDTLKVLVELNLCPCLSDEQLSQWKAKKTYPLTDDFMLWQRSGSAEENNPYYCRHRCLTQKLDLTDQSQRFLLGRAFYHLAQRRGFLSNRLDTSADSDESGKVKSGIAQLSVEMEKAGCEFLGEYFYQLYKQHGNTIKLRSRYTDREEHYKKEFLAICEKQELDPKWVEALQRAIYFQRPLKSQRKGVGKCTFEPKKPRCAESHPDYEAFRMLCFLNNVKIQTPNDTSLRPLNEDEREKIWPIFFRKSKPNFDFEDIAKALAGKNNYAWYKDAGEKPFKFNYRMQQGVSGCPVTAQLIDIFGSDWQTAIAETYTAVEKKNGTKTIDEMADDVWNVLYSFSSKDKLKAFATEKLQLDEASATKFANAKLPHGFASLSLKAIRNILPFLRQGFIYAHAVHLAKIPDIVTKAVWNDADKREMILSGLMEIIENYNPKDRGVEGTIDFCIKSHLQDVIDLRPGAADALYHPSMIETYPDAKLNKMGVFQLGSPRTNAIRNPMAMRSLHILRSVVNQLLRDGIIDRDTEVHVEYARELNDANKRKAIADYQREQEKKRKQYRDDIIALYKSECHKEIEPTDTDILKFQLWEEQNHLCLYTGTQIGICDFLGDNPKFDIEHTVPRSVGGDSTQMNLTLCDATFNRQVKGAQLPSQLSNHADILVRIDHWKSKCEDLRKQLDKIRTYGGMEKNMKDRLIQKRHRLKMDLDYWQGKYSRFTMTEVPEGFSRRQGAGIGLVSKYAGLFLKSLFHNEQNPNKSNVYVVKGVTTAEFRRMWGLQGEYEKKSRLNHCHHCIDAITIACIGKAEYDKMAQYYHDEELFQWRGTTTKPHFNKPWPTFTEDVLAIEQSLLVKHLTKDNMPKQAKKRVRTATGKYLAQGDTARGSLHKDTYYGAIEQNGEIRYVLRKPLNKFENEAELEKIVDQA

SEQ ID NO: 1148 - protein, 1375 aa, Unknown
  Prevotella sp. oral taxon 306 str. F0472
MKKILGLDLGTTSIGWALVNESENKDEQSSIVRLGVRVIPLTVDEKGNFEKGKAITTNADRQQVHAARINLQRYKLRRENLRDCLQKQGWIGSEPMCEDGKSSTFETYKLRAKAAVEEVSLHEFARVLFMLNKKRGYKSNRKANDKEEGKLFDGMTIAKKLYEEHLTPAEYSLQLLNTGRKFTPEYYRSDLIEEFEKIWNEQQKYYPEILTDEFKQQLEGKAKSNTSKLFLGKYGIYSADTKGLDRRLQPLKWRVEAMKQQVDKDVLAFVISDLKGQIANTSGLLGAISDRSKELYFSKQTIGQYLWASLQENPHISIKNQPFYRQDYLDEFEKIWETQATYHKELTSELKQEIRDIIIFYQRPLKSKKNLIAVCELEQRKVKVTVDGKEKEITIGPKIAPKSSPMFQEFRIWQNLNNILLLDHETNSKRPLYEEERNLLYEELSVKEKLSKTEALKVLGKKSKQWDLNYKELEGNRTQAVLYDCYNRIIVMSGHEECNFKKLKASDIRHYVKMIFKNLAFNTDILCFDSSLKGHELERQPMCQLWHLLYSYEGDNSRTGNDALLRKLETSFGFPKEYAAVLADVIFEDSYGNLSVKAMRNILPHLQAGKDYSQACEEAGYKHSRRSLTKEELNQKVYKEKLELLPKNSLHNPVVEKILNQMVNVINAVIEEYGKPDEIRIELARDLKIGAAERENMTRSINQGNAENKRIREILEKEFALSYLSRNDIIKYKLYEELKSNGFKTLYSDTYISKDKLFSKDFDIEHIIPKARLFDDSLSNKTIEARDVNIAKSNKTAFDFILERYGEQGVKTYKTKLLRLLEDGAISNKKYNNLLKTEADIPSGFIDRDLRNTQYIAKKAYEILSELVKIVTPTTGSVTNRLREDWQLVDVMKELNFEKYQKLGLADVIEDRDGRKVKRIKDWTKRNDHRHHAMDALTIAFTKPSYIQYLNNLNARSDKSSSIYGIEVKELHREEGKFRFNAPLPINEFRAEAKRHLKSVLVSIKAKKKVMTQNVNKIKTKHGIIKKVQLTPRGELHNATYYGTKKRPLVRMVKVGAALDEATIKRVCSPAIRAALLKRLNAYNGDAKEAFTGRNSIDKNPIYLDIEQTKLVPVLVKTIEWGMYHPIRKRITPDLKIDKVIDKGIREKLKARLAEFNGDAQKAFSNLDENPIYMDEAKRITLKRVSIEGVLSAIPLHTLKDKAGKPVIGSDGKPVFGDYVQTSNNHHIAFYIDDKGNLQDNPVSFFEAAERKSQGVPVIDRRYNCDKGWHFVFTMKQNEYFVFPNEATGFIPSEVDLLDEANYCIISPNLYRVQKLSKASGRDYWFRHHLETMLNDDLRLKNSTFKRIQSLKGLEDIVKVRINSIGKIVAVGKYD

SEQ ID NO: 1149 - protein, 1483 aa, Unknown
  Prevotella sp. MSX73
MKTILGLDLGTNSIGWAKVSVDDYGNYLHDIKLGSRIIPMSQDVLGNFDSGVTVSQTAQRTEFRSKRRLVQRNLQRRERLHRVLHVLDFLPAHYDAAIGWDRTEAVTYGKFLNHAEPKLAWEELGNGKRRFLFMDSFHEMVADFARCQPALVADGKKIPLDWTIYYLRKKALTQAITKEELAWILLNFNQKRGYYQLRGEEEEENPTKQEEYYELKVVSVEATDSRKGNDTWYNVHLENGWIYRRSSKISLDDWVGKVKQFIVTTEYEKDGTTLKTDKEGNVKRSFRAPNENDWGLRKKRTETLLEMSGKTVGAFIYDHLLQEPADKIRGNFIRTIERHYYKAELEAILAEQCKYHIELRDKEMLEACARELYLNNLPHQRSLMKKDMTYLLLYDLIFYQRPLKSKKALIANCPYEYYEYVDKETGEIKRQNIKCIAKSNPYFQEFRLWQFVLNLRLFDRVEDKEVTANYLPTADDHARLFTYLNDRKEINQETLLKDYFKLKKVKIGNEKEYPIRWNYIEDKEKKYPCNETRYELLMALDRAGIEHKWLDDNNLEYRLWHLLYSVEVKSESETALRKLKNDDAFVNSFLKVKPFKKEYGAYSEKAIKRLLAVMRKGFLWNEQDICDETRKRIEIIIKGDVDEKVKERMGHAAYSFDRVSDFQGLPEWLACYVVYGRHSEAMDIQRWDSPERLMAYINNFKQYSLRNPIVEQCILETLRTVHDIWKETGQIDEIHVELGREMKSTSEERARRTQNVLRNENTNLRIKSLLIELKNDTDICNVHPYSPMQQEILRIYEEGALQELNREDEDFEEISKISQMSQPSGKELNRYKLWLEQKYRSPYTGKAISLAKLFTPAYQIEHVIPQSRYFDDSFTNKVICEAEVNTLKSNLLGYEFIKKHGGEIIHCTTLGDVRIFSESEYKAFVMDHYANNKSKKDKLLMEDIPQEFLSRQMNDSRYISKVVKTLLSNIVRMADESEATSKSVIVCTGGVTDRLKKDWGLNDVWNSIVYSRFERLNRLTGTEAFGHWENKDGKRVFQTSMPLELQRGFRKKRIDHRHHAMDALVIACASRNIVNYLNNESANNPKKREDLRRQLCDKNRVIRKPWETFTQDAYNALENVVVSFKNYVRVINKATNRYEHYDENGKKRFVQQKGSELWAIRKPMHKETYYGHVNLRRKELVTLQKALDDIPSICDKKLRDYISALVEKHFNKRQLLAHFKSTDYYWQKQYVNKVYVWTFSDDIKPLVATRKLLDTSFDAKRIGTITDTGIQKILRNYLEAKGGNATLAFTPEGIVEMNQNISKYNDGKPHQPILKVRITEPMGAKYRVGQTENKMAKYVEAQSGTNLYFAIYEDSEGKRSYTTVPLDEVAERLKQRLSPVPEKDENDVPLKFYLSPNDLVYVPTEEELQLRECKLNKDRIYKMVSSTGSECHFIPYYVANVIYNKVEFEAKNKIGRALTGEMIKAVCWKLEIDRLGNILKVIK

SEQ ID NO: 1150 - protein, 593 aa, Unknown
  Prevotella sp. oral taxon 317 str. F0108
MNTRILGLDTGTNSLAWAVVDRDAKGNYTLVRRGDVIFTEGVNVDGQPVPSKAAVKSKYKSLRVQYARRRLRKIDTLKVLVSLDLCPYLSDQQLSQWKAKKTYPLTDDFMLWQRSGSAEENNPYYCRYRCLTQKLDLTDQSQRFLLGRAFYHLAQRRGFLSNRLDTTSDSAESGKVKSGIAQLSVEMEKAGCTFLGEYFYQLYKQHGNTVRLRSRYTDREEHYIKEFLAICEKQELDAQWVEKLQRALYFQRPLKSQRKGVGKCTFEPKKPRCAESHPDYEAFRMLCILNNIKIKTPKDVSLRPLNAEEREKVWPLFFRKSKPNFDFEDIAKALAGKNNYAWYKDAGEKPFRFNYRMHQGVSGCPVTAQLIDIFGSDWKAGIAETYTAVGKKNGTKTIDEMADDVWNVLYSFSSKDKLKAFATDKLQLDEARATKFANAKLPHGFAALSLKAIRNILPFLRQGFIYAHAVLLAKIPDIVTAAVWDDADKREQILSGLLEVIENYNPDDRGIEGTIDFCIKSHLQDVVDLRPGAADALYHPSMIEAYPDAKLNKMGVFQLGSPRTNAIRNPMAMRSLHILRSVVNLLLRDGMLS

SEQ ID NO: 1151 - protein, 1424 aa, Unknown
  Prevotella sp. C561
MTQKVLGLDLGTNSIGSAVRNLDLSDDLQWQLEFFSSDIFRSSVNKESNGREYSLAAQRSAHRRSRGLNEVRRRRLWATLNLLIKHGFCPMSSESLMRWCTYDKRKGLFREYPIDDKDFNAWILLDFNGDGRPDYSSPYQLRRELVTRQFDFEQPIERYKLGRALYHIAQHRGFKSSKGETLSQQETNSKPSSTDEIPDVAGAMKASEEKLSKGLSTYMKEHNLLTVGAAFAQLEDEGVRVRNNNDYRAIRSQFQHEIETIFKFQQGLSVESELYERLISEKKNVGTIFYKRPLRSQRGNVGKCTLERSKPRCAIGHPLFEKFRAWTLINNIKVRMSVDTLDEQLPMKLRLDLYNECFLAFVRTEFKFEDIRKYLEKRLGIHFSYNDKTINYKDSTSVAGCPITARFRKMLGEEWESFRVEGQKERQAHSKNNISFHRVSYSIEDIWHFCYDAEEPEAVLAFAQETLRLERKKAEELVRIWSAMPQGYAMLSQKAIRNINKILMLGLKYSDAVILAKVPELVDVSDEELLSIAKDYYLVEAQVNYDKRINSIVNGLIAKYKSVSEEYRFADHNYEYLLDESDEKDIIRQIENSLGARRWSLMDANEQTDILQKVRDRYQDFFRSHERKFVESPKLGESFENYLTKKFPMVEREQWKKLYHPSQITIYRPVSVGKDRSVLRLGNPDIGAIKNPTVLRVLNTLRRRVNQLLDDGVISPDETRVVVETARELNDANRKWALDTYNRIRHDENEKIKKILEEFYPKRDGISTDDIDKARYVIDQREVDYFTGSKTYNKDIKKYKFWLEQGGQCMYTGRTINLSNLFDPNAFDIEHTIPESLSFDSSDMNLTLCDAHYNRFIKKNHIPTDMPNYDKAITIDGKEYPAITSQLQRWVERVERLNRNVEYWKGQARRAQNKDRKDQCMREMHLWKMELEYWKKKLERFTVTEVTDGFKNSQLVDTRVITRHAVLYLKSIFPHVDVQRGDVTAKFRKILGIQSVDEKKDRSLHSHHAIDATTLTIIPVSAKRDRMLELFAKIEEINKMLSFSGSEDRTGLIQELEGLKNKLQMEVKVCRIGHNVSEIGTFINDNIIVNHHIKNQALTPVRRRLRKKGYIVGGVDNPRWQTGDALRGEIHKASYYGAITQFAKDDEGKVLMKEGRPQVNPTIKFVIRRELKYKKSAADSGFASWDDLGKAIVDKELFALMKGQFPAETSFKDACEQGIYMIKKGKNGMPDIKLHHIRHVRCEAPQSGLKIKEQTYKSEKEYKRYFYAAVGDLYAMCCYTNGKIREFRIYSLYDVSCHRKSDIEDIPEFITDKKGNRLMLDYKLRTGDMILLYKDNPAELYDLDNVNLSRRLYKINRFESQSNLVLMTHHLSTSKERGRSLGKTVDYQNLPESIRSSVKSLNFLIMGENRDFVIKNGKIIFNHR

SEQ ID NO: 1152 - protein, 241 aa, Unknown
  Prevotella sp. oral taxon 472 str. F0295
QAVKEKIKEAIAGKNFKTAIAEPIFMNKEKGIRINKVRYYVKAQERLKIRQQRDLSSKEYKQFFCVENESNYLLAIYEGELKGKKERDFCVVNNLDSAACLKRSNKGKAAPLVPERSEERNLPLLAVLKRGTQVLFYENSPEEILFDNPQDLVRRLYKVTGINTKKDVKNGKTYLYGNIELRFHQNAQKKDDVKMQSGVYKNNEVLRQGIVLSHKQFKALVEGVDFEFNVLGEIKKKERHA

SEQ ID NO: 1153 - protein, 1216 aa, Prevotella stercorea
MTKILGIDTGTNSLGWAIVDKTADNYNLLDKGVNIFQEGVKIEKGIESSKAAERTEHRATRVRYYRIKLRKIRLLRILSDNHLCPPLSQEELSTWRLKKVYPKNELFMQWQRTDDDTEKTPYAYRHKCIHEKLDLSDVTDRYILGRAFYHIIQRRGFLSNRKEQGGEDSGKVKEGISTLTHEMNEAGYEYLGDYFYALYNKGEKIRKHYTARNEHFLSEFKAICEKQDLEKELGSEVVRNIEKAIFDQRPLKSQKGQVGKCVFEKNKTKCPSSHPMYEEFRMLTFINNIKIKTPNDDVLRPLNTGEREKIMPLFFRKSKKQFDFEDITKKLAPKKMYGFYKKEEDAEMPFLFNYPMDTSVSGCPVTAALKDVFGDDWITAICETYTLGEGKSRFDIVNDIWHALYFYSDKDKLAEFAINRLQLSEDEAKIFSEISLPADYASLSLKAICKILPYLRRGLIYSHAVFLGNLCEVMPKYEWSIKEMRETIIDNIIMEMDKCDTKDKRTFEVCIKDYLKGQYNVSDNSLKKLYHPSMIETYPRVQYTNEHGVYQLGSPRIDSVRNPMAMRSMFRLRKLVNRLLVEGKIDQNTEVHIEFARELNDANKRNAIALFVKENQSANDEARKQIITLFKKETGTDIEPTDKDILKYVLWEEQNHICLYTGKQIRISDFIGANPKFDIEHTIPRSVGGDSTKMNLTLCDSRFNREVKKTKLPVELPNHDEIMERIKEWKKNYELLDIQIRKNKKLSKGATTKEQKDTIIRKRHLLELRRDYWRGKYERFTMESVPEGFSRRQGTDISVISKYARLYLKSLFNRVYTVKGIATSDFRKIWGIQDIYSKKERINHVHHCIDAIVIACIGLDEYNKLGAYYHDEENNKWYGMSKASFKKPWATFVEDIKKIQDEILVYHYTPDNMPKQGRRRIKIDGKKILCKGDAARGSLHNDTYYGAIENDGAVKYVKRIDLASLEEKDVKNIVDDTVRSIIEAAIKEKGFKDAMASTIWMNEEKRVPIKKVRCFTPSITKPLNIRKQRDVSIKEYKQQYHVANDSNYLLALYIGTDNKGKEKREFEIVNILQAAQYYRTSNDKEVVDRHIVPIKSEHDYPFAYTLKIGTMVLLYEKSPNEVWDATIKERNRRLYKVTGLSTMRMKGRNGEYAYATVKLIHNEEARPSKDIKAKNGEYEQGEEFRPAIIMLHTQLNALVQGYDFEINELGEIRRLR

SEQ ID NO: 1154 - protein, 1487 aa, Prevotella timonensis; identical to SEQ ID NO: 130

SEQ ID NO: 1155 - protein, 770 aa, Pseudoramibacter alactolyticus
MAKGYFASDEEIDFSGVDDGFKNTLSSHQKFKEIFDVEVLNDWQKSMSEKIIFWATVYGDSKKFLKERLEDAYGNELDQKQIKRILGLRFKDWGRLSEAFLNLEGKNSKTNQSQTIIEALWNGDGTNNFNLMELLSSQFTYRDTLKKRALKGEKTLTNITYEDLSDLYLSPSVRRMVWQTILIVKELRQVLGAGPAKIFIEMARDVTLKAGTRTTSRRQQLLDLYKNVQTESRNWVEEIETQEESRFRSKKIFLYYTQMGQCMYTGEPIVFKDLFNRNLYDIDHIYPRHFVKDDSLINNLVLVKKQANSHKSDTFPIENSIQQARRDFWKWLSEKGLISREKFNRLTRRTSFSDEELAGFISRQIVETRQGTKAVAQIFENALPDSEVVYVKAGNVSDFRHHFNLLKCREINDLHHAQDAYLNVVVGNVYHTKFTKNPINFIKGYRKDRKAYAYHMDQIFDHPVKRNDIIAWQTDKNQSIATVKKVMAKGTPLVTRMSYEEHGELSNQNICSAKAAQKAEGKGYLPIKNSERLSNTQRYGGYNKYAGSYFFLVEHTLKKNRVRTIETMPLFLRDTIKTSKDLLKYCCESLKLEAPSIRVMKIKMGSLLSVNGAFVYLTGRSGKKLITPNGFQLILPQKWQDYIRLLIKTKDSPDDVEGISGGKNIEFYDILVEKHTKTCLKNRPNPIGEKLREWRNDFIALDNQKQSDILLEILKLTTFDNSGADLRAIGGKNQSGVSTIGKKISSQKSVVLVHRSVTGIFEKQVDLLSI

SEQ ID NO: 1156 - protein, 103 aa, Rhizobium etli
MSGEQLTREIGRSGVKASAVGLGTWAIGGWMWGGTDEAQSIAAIQASLDAGVTLIDTAPAYGLGRSEEIVGKALAGRRDKAVIATKCGLVWHTQKGNHFFDQD

SEQ ID NO: 1157 - protein, 1059 aa, Unknown
  Rhodovulum sp. PH10
MGIRFAFDLGTNSIGWAVWRTGPGVFGEDTAASLDGSGVLIFKDGRNPKDGQSLATMRRVPRQSRKRRDRFVLRRRDLLAALRKAGLFPVDVEEGRRLAATDPYHLRAKALDESLTPHEMGRVIFHLNQRRGFRSNRKADRQDREKGKIAEGSKRLAETLAATNCRTLGEFLWSRHRGTPRTRSPTRIRMEGEGAKALYAFYPTREMVRAEFERLWTAQSRFAPDLLTPERHEEIAGILFRQRDLAPPKIGCCTFEPSERRLPRALPSVEARGIYERLAHLRITTGPVSDRGLTRPERDVLASALLAGKSLTFKAVRKTLKILPHALVNFEEAGEKGLDGALTAKLLSKPDHYGAAWHGLSFAEKDTFVGKLLDEADEERLIRRLVTENRLSEDAARRCASIPLADGYGRLGRTANTEILAALVEETDETGTVVTYAEAVRRAGERTGRNWHHSDERDGVILDRLPYYGEILQRHVVPGSGEPEEKNEAARWGRLANPTVHIGLNQLRKVVNRLIAAHGRPDQIVVELARELKLNREQKERLDRENRKNREENERRTAILAEHGQRDTAENKIRLRLFEEQARANAGIALCPYTGRAIGIAELFTSEVEIDHILPVSLTLDDSLANRVLCRREANREKRRQTPFQAFGATPAWNDIVARAAKLPPNKRWRFDPAALERFEREGGFLGRQLNETKYLSRLAKIYLGKICDPDRVYVTPGTLTGLLRARWGLNSILSDSNFKNRSDHRHHAVDAVVIGVLTRGMIQRIAHDAARAEDQDLDRVFRDVPVPFEDFRDHVRERVSTITVAVKPEHGKGGALHEDTSYGLVPDTDPNAALGNLVVRKPIRSLTAGEVDRVRDRALRARLGALAAPFRDESGRVRDAKGLAQALEAFGAENGIRRVRILKPDASVVTIADRRTGVPYRAVAPGENHHVDIVQMRDGSWRGFAASVFEVNRPGWRPEWEVKKLGGKLVMRLHKGDMVELSDKDGQRRVKVVQQIEISANRVRLSPHNDGGKLQDRHADADDPFRWDLATIPLLKDRGCVAVRVDPIGVVTLRRSNV

SEQ ID NO: 1158 - protein, 1405 aa, Riemerella anatipestifer
MKTILGLDLGTNSIGWALVKEAENSNEKSEIIKLGVRVNPLTVDEKTNFEAGRPLSTNADRTAKRSARRNLQRYKLRRKNLIDLLIKNQLIDKDTPLTEIGKNTTHQTLELRAKAARERIELEDLARVFLAINKKRGYRSSRKVNNEEEGQAVDGMAVAKKLYDENLTPGQYAYELLSKGKKYVPDFYRSDLQAEFNAIWEYQKQFYADILDDELYNALKGQGQQNSRKRFLAIKGVYTAENKGKRDDVKLRHYKWRSEAISKKINIEEVAYVLVEINNDLNKSSGYLGAISDRSKELYFNKETVGENLWKQIQKNPHTSLKNQVFYRQDYLDEFEQIWETQAQFHPQLTLALKEQIRDVIIFYQRKLKSQKGLLSFCQFESWEIERKDENGNVILNKTTQLPKRQTVGRRVAPKSSPLFQEFKIWQNINNLEVTKISEGASKNKKETETLSDDERKLLFEELNLRGNLSQKEVLQILGLKDKEYKTNFSEGLEGNRTNAALFNIYQQIAENEGYGFDWSKKSAQEIKEELKAVFPQIGIQADILDFNANLDGKEFENQASYQLWHLLYSAEEDDKINEEDQIIYGNSAVSLKKKLCEKFGFTPEYAKWIANVSLQDDYGNLSTKAMRKIIPYLIDGNDYSEACALAGYNHSNSLTKEENDNRELLDKLELLPKNSLRNPVVEKILNQMVNVVNQVIETYGKPDEVRIELARELKKSAEKRAEMTKSINEATRRNEDIKKLITKDFGIPNPTKSDVVRYRLWEELAPLAYKDVFTGKQIKKEDLFSSKIDIEHIIPKALLFDDSFSNKTLVFRETNLKKADRTAYDFIESDYNATLDDYIQRVETLYNNTKGTISKGKRNKLLMAQKNLPDGFIERDLRNSQYIAKKAKAMLYQVFKDVNVTSGSITDRLREDWDLINVMKELNFPKYKALGLTEIEERYDIGQEKTKRVEVITDWTKRNDHRHHAMNALTVAFTTSSHIQYLNYLNARKNESHKEHKNIKGIENKITHKQKDKRKFIPPMPNFREEAKKHIETILVSIKNKNKVYTKNINKTKKKSGHNTKEQLTPRGQLHKETVYGKSKRPMSKPTKINKNFSLEQAQLIINVQEKELVLRHLAQFDNNPAVAFDTKTLKKMPLLKNGEPLKEVLCFEEIFTIRKDITPDLKIEKVVDEKIKAILEQRKKDFGGNAKEAFSDLDKNPIWLNKKKGICIKRVTITGVSNAEALHHQKDHLGREILDDNGNPIPADFVSTGNNHHLAVYLDSEGKLQDNIVSFYEAVVRTSQGLPVVDKGLNKDLGWKFLFSLKQNEMFVFPNDDFDINDFDLLDDKKAELISKHLYRVQKISKVSAGNSFVRDIVFRHHLETTVKEVKELKDISYIQLKSLEGLRNIKKVRINHIGKIVQVGEY

SEQ ID NO: 1159 - protein, 1145 aa, Riemerella anatipestifer
MKTILGLDLGTNSIGWALVKETENSNEKSEIIKLGVRVNPLTVDEKTNFEAGRPLSTNADRTAKRSARRNLQRYKLRRKNLIDLLIKHRLIDKDTPLTEIGKNTTHQTLELRAKAARERIELEDLARVFLAINKKRGYRSSRKVNNEEEGQVVDGMAVAKKLYDENLTPGQYAYELLSKGKKYVPDFYRSDLQAEFDSIWEYQKQFYADILDDELYNALKGQGQQNSRKRFLAIKGVYTAENKGKRDEVKLQHYKWRSEAITQKLSIEEVAYVLVEINNDLNKSSGYLGAISDRSKELYFNKETVGENLWKQIQKNPHTSLKNQVFYRQDYLDEFEQIWETQAQFHPQLTLALKEQIRDVVIFYQRKLKSQKGLLSFCQFESWEIERKDENGNVILNKTTQLPKRQTVGRRVAPKSSPLFQEFKIWQNINNLEIAKISDGNSKNKKETEALSDDERKLLFEELNLRGNLSQKEVLQILGLKDKEYKTNFPEGLEGNRTNAALFNIYQQIAENEGYGDWTKKSAQEIKEELKAVFPQIGIQADILDFNAELDGKEFENQASYQLWHLLYSAEEDDKINEEDQIIYGNSAVSLKKKLCEKFGFTPEYAKWIANVSLQDDYGNLSTKAMRKIIPYLIDGNDYSEACALAGYNHSNSLTKEENDNRERLNKLELLPKNSLRNPVVEKILNQMVNVVNQVIETYGKPDEVRIELARELKKSAEERAEMTKGINEATRRNEDIKKLITKNFGIPNPTKNDVVRYRLWEELAPLAYKDVFTGRQIKKEDLFSSKIDIEHIIPKALLFDDSFSNKTLAFRETNLKKADRTAYGFIESDYNATLDDYIQRVETLYNNAKGTISKGKRNKLLMAQKNLPDGFIERDLRNSQYIAKKAKSMIEKVFNDVNVTSGSITDRLREDWDLINVMKELNFPKYKALGLTEIEERYDIGQEKTKKVEVITDWTKRNDHRHHAMDALTVAFTTKSHVQYLNNLNTIHSLKGDEVDLELSKLYGLKNTITEVVNKKRKFIPPMPNFREEAKKHIETILVSIKNKNKVYTKNINKTKKESGYHTKEQLTPRGQLHKETVYGKSKRPMNKPTKINKNFSLEQAQLIINVQEKELVLRHLAQFDNNPAVAFDTKTLKKCHYLKMVNL

SEQ ID NO: 1160 - protein, 1400 aa, Riemerella anatipestifer
MKTILGLDLGTNSIGWALVKETENSNEKSEIIKLGVRVNPLTVDEKTNFEAGRPLSTNADRTAKRSARRNLQRYKLRRKNLIDLLIKHRLIDKDTPLTEIGKNTTHQTLELRAKAARERIELEDLARVFLAINKKRGYRSSRKVNNEEEGQVVDGMAVAKKLYDENLTPGQYAYELLSKGKKYVPDFYRSDLQAEFDSIWEYQKQFYADILDDELYNALKGQGQQNSRKRFLAIKGVYTAENKGKRDEVKLQHYKWRSEAITQKLSIEEVAYVLVEINNDLNKSSGYLGAISDRSKELYFNKETVGENLWKQIQKNPHTSLKNQVFYRQDYLDEFEQIWETQAQFHPQLTLALKEQIRDVVIFYQRKLKSQKGLLSFCQFESWEIERKDENGNVILNKTTQLPKRQTVGRRVAPKSSPLFQEFKIWQNINNLEIAKISDGNSKNKKETEALSDDERKLLFEELNLRGNLSQKEVLQILGLKDKEYKTNFPEGLEGNRTNAALFNIYQQIAENEGYGDWTKKSAQEIKEELKAVFPQIGIQADILDFNAELDGKEFENQASYQLWHLLYSAEEDDKINEEDQIIYGNSAVSLKKKLCEKFGFTPEYAKWIANVSLQDDYGNLSTKAMRKIIPYLIDGNDYSEACALAGYNHSNSLTKEENDNRERLNKLELLPKNSLRNPVVEKILNQMVNVVNQVIETYGKPDEVRIELARELKKSAEERAEMTKGINEATRRNEDIKKLITKNFGIPNPTKNDVVRYRLWEELAPLAYKDVFTGRQIKKEDLFSSKIDIEHIIPKALLFDDSFSNKTLAFRETNLKKADRTAYGFIESDYNATLDDYIQRVETLYNNAKGTISKGKRNKLLMAQKNLPDGFIERDLRNSQYIAKKAKSMIEKVFNDVNVTSGSITDRLREDWDLINVMKELNFPKYKALGLTEIEERYDIGQEKTKKVEVITDWTKRNDHRHHAMDALTVAFTTKSHVQYLNNLNTIHSLKGDEVDLELSKLYGLKNTITEVVNKKRKFIPPMPNFREEAKKHIETILVSIKNKNKVYTKNINKTKKESGYHTKEQLTPRGQLHKETVYGKSKRPMNKPTKINKNFSLEQAQLIINVQEKELVLRHLAQFDNNPAVAFDTKTLKKMPLLKNGEPLKEVLCFEEIFTIRKDITPDLKIEKVVDEKIKAILEQRKKDFGGNAKEAFSDLDKNPIWLNKEKGICIKRVTITGVSNAEALHHQKDHLGREILDDNGNPIPADFVSTGNNHHVAIYEDEKGKLQEKVVSLYEAVARANQGLPVVDKGLNEDLGWKFLFTMKQNEMFVFPNDDFDVNDIDLLDENNAKIISQHLFRVQKLATKNYMFRHHLETNVQEVKELNDIAYKSIRSTEPLKNIKKVRINHIGKIVQVGEY

SEQ ID NO: 1161 - protein, 1128 aa, Roseburia intestinalis
MDEKMDYRIGLDIGIASVGWAVLQNNSDDEPVRIVDLGVRIFDTAEIPKTGESLAGPRRAARTTRRRLRRRKHRLDRIKWLFENQGLINIDDFLKRYNMAGLPDVYQLRYEALDRKLTDEELAQVLLHIAKHRGFRSTRKAETAAKENGAVLKATDENQKRMQEKGYRTVGEMIYLDEAFRIGCSWSEKGYILTPRNKAENYQHTMLRAMLVEEVKEIFSSQRRLGNKKATEELEEKYLEIMTSQRSFDLGPGMQPDGKPSPYAMEGFSDRVGKCTFLGDQGELRGAKGTYTAEYFVALQKINHTKLVNQDGETRNFTEEERRALTLLLFTQKEVKYAAVRKKLGLPEDILFYNLNYKKAATKEEQQKENQNTEKAKFIGMPYYHDYKKCLEERVKYLTENEVRDLFDEIGMILTCYKNDDSRTERLAKLGLVPIEMEGLLAYTPTKFQHLSMKAMRNIIPFLEKGMTYDKACEEAGYDFKADSKGTKQKLLTGENVNQTINEITNPVVKRSVSQTVKVINAIIRTYGSPQAINIELAREMSKTFEERRKIKGDMEKRQKNNEDVKKQIQELGKLSPTGQDILKYRLWQEQQGICMYSGKTIPLEELFKPGYDIDHILPYSITFDDSFRNKVLVTSQENRQKGNRTPYEYMGNDEQRWNEFETRVKTTIRDYKKQQKLLKKHFSEEERSEFKERNLTDTKYITTVIYNMIRQNLEMAPLNRPEKKKQVRAVNGAITAYLRKRWGLPQKNRETDTHHAMDAVVIACCTDGMIQKISRYTKVRERCYSKGTEFVDAETGEIFRPEDYSRAEWDEIFGVHIPKPWETFRAELDVRMGDDPKGFLDTHSDVALELDYPEYIYENLRPIFVSRMPNHKVTGAAHADTIRSPRHFKDEGIVLTKTALTDLKLDKDGEIDGYYNPQSDLLLYEALKKQLLLYGNDAKKAFAQDFHKPKADGTEGPVVRKVKIQKKQTMGVFVDSGNGIAENGGMVRIDVFRVNGKYYFVPVYTADVVKKVLPNRASTANKPYSEWRTMEDKDFLFSLYSRDLVHIKSKKGIPIKNVDGSLGESKEVYAYYIGADISGAKIEGKAHDSRYTFRGIGVQKLELIEKCQVDILGHISTVKNEKRMGFS

SEQ ID NO: 1162 - protein, 1471 aa, Scardovia wiggsiae
MGYKAPRNDKGEIDYGVGLDLGNGSVGWVAMDKDYHLIRARGHELIGARLFDPANSAENRRESRTTRRRLSRRRWRLRMLDSLFASELAKIDPNFLARRKYSWVHPKDEQNHENWYGSIIFGSKEQDKQFYKDYPTIYHLRKKLTEDTERHDIREIYVAIHHIVKYRGHFLREGEINSENLFDPEGFVELIKDVIKLNNSYDESTPIFEASPADVSEALLNEHTSRSGRIEDTLDKLDFSVSRVDKHELKGMRDAAKAVIGAIVGNTADFSKIFNLDNLDKDSKDNLKLKFADSNFDEKYGGVVGSGLLDETQIELVDRIHAVYDAVALKGILGDAHTISEAKVESYEKHRKNWKLIKEELRTKENKDEVDLWYGDLSGRQYKNPPDPEKGPDEGSKKDSPIRDSDQKQNLIKKANDYFTELIDDSQLSEEQKNCLKNDINNGQLFPVQRSSDNGVIPYQIHLNELRRIIENQKQYYPFLAETFIRKTAEGKSYEENKIVALLKFRVPYYVGPLVSKEDMEEHSSGNSAYHWMARNPGRGEAITPWNFDEVVDKDESGARFISRLTGTDTYLLGEPTLPQHSLLYEEYMVLSELNNVRLNVRQGNHWSDKNRQRLSYKQKEFLIENLFKEHKTVTRKRAEDCLSSMGCGEVQLFGLSDEKKFASSLSSYITLKKILGKAFVDDSGNSAILERIIEVQTVFEDREPLTHQLSLIDSLTVEQRKQLAKIHYTGWGKLSRKLLTSKKGSYKIHSQNEIMRTQHSIIDIMRGDSLNLIEIIRDKKIGIGEWIDNENLDRETGESDVSRLESVFEGIVMSPRVKRGVVQAVRVIDDLAKAIGNPPQRIFIEMADEVQASQRTVSRLSRLKALYGSPSLQKEFNDLKDLRKSLNETKDADLQEDRLYLYYIQLGKDLYTGKEISIDSLSSAYDIDHIVPQALTQDDSIDNRVLVSRKENARKTDSYLYTPDLIKNMRPLWGKLLAAGLMSQKKYDALTRVDDFKDREKQRFVQRSLVETRQIMKNVSTILRTYYGEDTNVVTLKSSITHDMRKYLGFPYKNRDINDYHHAQDALCISAAGQFMLNRHFVSGGEVTDGASNAYNMYLAEYLQEFRDAKARGERKRSTAFGFVVGSMSSKDDEKRTDHRTGEIVWSETNAEYLRKVMNYKKMLITQKVGDVKTRALYDETRYGHKESSAKSIKFDNLRRDTSLYGGFSGASTAYMMLVEYKKKNKLVSITAQEASLLAVADQKNDTVSVMDGILASHGLSGAKILLPKIVTGQLLDYSDALVTLQSASELNTARQMWLPRNDYNDIDIILKSKDIEDAAHKLGYDSDTVHVLRRIQKLFEAVFRVAESQFPLHQLSKDQQEEILRDPQNYGFGSAVKLLGGLLKALHANAENTNLAGLVKVLHGDKEYSDDGKAKEFKKFGFSPRWRRISNPTGFTLSDSDTFIYQSPSGIFEQRVTVKELKEKADKQK

SEQ ID NO: 1163 - protein, 116 aa, Sphingobacterium spiritivorum
MFRKYFEEKNSARLLFTLKQGDFVYVPDDNEEVILDESSPLFIDYWKNISERSNNIHVVQKFSGKEIYFLKHTIADTIAKKIEFGSQDCYQSLNGKSIKEFCIKIDSDRLGNISKV

SEQ ID NO: 1164 - protein, 1306 aa, Sphingobacterium spiritivorum; identical to SEQ ID NO: 93

SEQ ID NO: 1165 - protein, 1110 aa, Unknown
  Sphingobium sp. AP49
MAEGKKRIWRLGADLGANSLGWAAIELSAPVNGKPIAILAAGSRIFSDGRDPKSGASLAVDRRDARAMRRRRDRFKQRQKALIKYLIADGLFPADEAARNAMAAIDPYAVRARALDEALSLPELGRALFHLNQRRGFKSNRKADRKADDDAGKIAIGIDRTRDAIAEDEADAGAEPGSWTFGKWLHERRLKGQSVRTRLRPESGEDAKGDGYDFYPDRALMEEEFDAIWAAQAPHHPDVLTNDVHDRLHEIIFYQRPLKAPQVGMCSLIPGDRRLPKAHPLFQRRRLLEELNALMIVRPGEVAQRLTREERDILLLKLKDKNKVSFATLRKALKLDPDARFNKESEDRTDLKGDEVAAVMGSKTRFGNLWVHLSIEAQWDVLARLDAVESDAEDAAFCAWLVETYALTPEQARAVANAPLPPGYGRFGETATRKLIEALRDGKKDDRVLVYSEAVTEAGLGHHSDRRTGEVFEDAKGRPQLPYYGVALERHIMPGTGDPSDPEEMRVGRLTNPTVHIGLNQLRRILNVLIRAYGPPAEIAIELARELKLTDEDKKRINRENNDNRIAAERRSEKLLAIGQADSGANRALLKLWEELNPANVLDRRCIYSGRQISIDMLFSAAVEVDHILPFAATLDDSNGNKIVCLREANREKRKRSPHDAWGHSARWDEIAARAAQLPRNKRWRFEPDAMDKFRDEGGFQARHLVDTQYLARLSREYLATLYPEKGEGSGHIWVSPGRLTEMVRRKLGLNDLLPDHNFGGGADQAKNRLDHRHHAIDAVVVAIVDRGMLNAIARASGQEGAEGRERIIIPEPWDGFRDALRETVNRITVSHRTDHGTASKAGLPKGKDATAGRLHNDTAYGFTGDTDAKGNSIVVRRVPLSSFKKLADLDRIRDADLKAALYQHLNGLEGKAFEKALAEFHKLEWHNFGGVRRVRVTEPLTVIPIKDRNGRIYKGYKGDSNYRYDVWELPDGKWVTNWKNEAGEAMSSVISMFDAHQSSEPPRPHPAARKILSLHQNDLLAIEREGEDRKLMRVVKFGQSGQITLAEHQQAGDLKKRDAVSNDDDPFKYFAPTSGGLKKVKARQVRIDEIGRVLDPGFPARTARRKTRG

SEQ ID NO: 1166 - protein, 1084 aa, Sporolactobacillus vineae
MKYSIGLDIGISSVGWSVINLDRERIELMGARLFDAAENPKNGSSLAAPRRDARSARRRLRRRRYRVGRVRHFIIDRGLVTRGQADQLFDWKDGDLDIWLVRVNALERLLTDREFARVLIHIAKNRGYRSNRKSEAKSGENGQVLSAIKANKELMEEKGYQTVAEMLVNEPETFAGRKRNRGGEYTHVIARSELEHEIRLIFTKQRAFGNRFATEENENTYVKIWAAQRPVATKDDILKKIGDCTFEKGEKRAPKASYAFQYFRALDKLNRLRILSVREPSRNLTDDERNLIVPALFNHDKQKYSDLRKILQLRDDQKFNELFYDPGKSLKENENKTFLSLAEQYKIRKVIRDVQGKDGLLQYRPLDIDTIAYALTVFKDDQDTRDYLSNTFVNGNGKQVLNLANRAFDAELIDGLLSLSFAKFGHLSLKALHKLIPHMEQGLSYYDACKKVGYHDNEQVGKSKQHLLPVIPADEIRNPVVVRSLSQTRKVINAIIKRYGSPTFMYIELAREMGRPYNERRDLEKQYNKNRTVNDSAIEQIHELYPEIGAPRGHDILKYKLWQQQDCKCAYSLEKIPAEKIFEPGYAEVDHIIPYSRSFDDSNSNKVLVLSRMNQEKKNRTPYEWFGGDEHRWNKFESYVNALKVNRKKKSLLTKKNMDTEEEDTFKSRHLNDTRYITRFIKSFVEDNLLFREIEGAKQHVFTVNGAYTSLMRKRWGFNKNREESDLHHSVDAVIIAVSQPFRNEVSRYFKHREISLPQLLKRTWDYFPEPWEGFVKELRARTLQDPEKLKLALESLDLDSYDPEFIDEVKPIFISRMPKRSIKGQIHDETLRRNRGKTKDGFVKIVTRTRLENIKFDKNGDFPMYGRESDPKTYQAIKQRYLENNKDKKKAFIEPLYKPAKNPNNASLIRSVKIEDKANQIVPLRDEAVAYNASIVRTEVYRNKETGKFYLAPVYVSDVFAGREPRRFIRANVPYEQWVNITDKFTFLFNLYPNDVIYIKMKKVKTTKSNINKTISWQESYFYFKGTDIHTGAITIIDHMNSFTDRVGTQGLQLFEKYQVDPLGNLSRVHGETQYGVPALSHS

SEQ ID NO: 1167 - protein, 475 aa, Staphylococcus massiliensis
MGQDYILGLDIGITSVGYGLIDYHDKSVIDAGVRLFKEANVENNEGRRSKRGSRRLQRRRKHRLARTRNLLESYQLNPFPKCEKNPYEIRVKGFKEVLTSDELSAALLHLAKRRGIDNVHVTDTESDSSDNGLSTKEQLAKNQKALESRYVCELQLERLLNDNKVRGANNRFKTQDFVREAKQILSIQKDHHNLDQVFIDKYISLLETRREYYEGPGKGSPYGWDGDIKKWYELLMGRCTYFPESLRSVKYAYSADLFNALNDLNNLVIVRDENDKLTYPEKYHIVENVFKQRKKPTLKQIAKEIDVAPEDIRGYRVTASGTPVFTSFKLYHDIKSVTSNDKVLEDTELLDAIAEVLTIYQSPIEVQEKLESLNVILTKEEIEGISKLTGYTGTHALSLKAIQIVIDELWETNDNQMTIFTRLNMKPQKVDLAKANKIPTSLVEDFIISPVAKRAFIQSIKVINAVIKNMVCLKI

SEQ ID NO: 1168 - protein, 581 aa, Staphylococcus massiliensis
MPKDIIIELAREKNSDEERKIIRDVQKRNQQTRDLVDKVIKETGKTKAKGMVEKLILHDKQEGKCLYSLKSIPLEDLLNNPHHYEVDHIIPRSVSYDNSMNNKVLVLQEENSKKSNQTPFQYFNSSNTHITFKQFKQHVLNLSKTKDRITKKKKEYLLEERDINKFSVQKEFINRNLVDTRYATRELMTLLRAYFSANELDVKVKAINGGFTSYLRKRWDFKKDRNAGYKHHAEDALIIANVDFIFKQLKALDNAKKVMEGRKVQVEKDNVEDNEHYESLFREPDQIKEIKLYDNYKFSHRVDKKPNRELINDTIYSTRKVDNKTYTIQTVNNIYDKQNDQLKKLFNKSPEKFLMYKHDPKTFDKLATIMRQYKNEKNPLYKFHDETGEYLTKYAKKDNGPIVKSLKYIGKQVNAHLDITNDYENSNNKVVKLSLKPFRFDVYLDDGKYKFVTVKYLDIIKKDTYYVIDEEKYKLALQQKKISENAKFIGSFYNNDLIKINGELLRVIGVNDDAKNTLELNMIDISYRDYVENMNLATTPRIRKNIGKSITILEKYTTDILGNTFKISSPEKPQFIFKVRD

SEQ ID NO: 1169 - protein, 1334 aa, Staphylococcus pseudintermedius; identical to SEQ ID NO: 200

SEQ ID NO: 1170 - protein, 1112 aa, Staphylococcus simulans; identical to SEQ ID NO: 247

SEQ ID NO: 1171 - protein, 773 aa, Streptococcus agalactiae
MNKPYSIGLDIGTNSVGWSIITDDYKVPAKKMRVLGNTDKEYIKKNLIGALLFDGGNTAADRRLKRTARRRYTRRRNRILYLQEIFAEEMSKVDDSFFHRLEDSFLVEEDKRGSKYPIFATLQEEKDYHEKFSTIYHLRKELADKKEKADLRLIYIALAHIIKFRGHFLIEDDSFDVRNTDISKQYQDFLEIFNTTFENNDLLSQNVDVEAILTDKISKSAKKDRILAQYPNQKSTGIFAEFLKLIVGNQADFKKYFNLEDKTPLQFAKDSYDEDLENLLGQIGDEFADLFSAAKKLYDSVLLSGILTVIDLSTKAPLSASMIQRYDEHREDLKQLKQFVKASLPEKYQEIFADSSKDGYAGYIEGKTNQEAFYKYLSKLLTKQEDSENFLEKIKNEDFLRKQRTFDNGSIPHQVHLTELKAIIRRQSEYYPFLKENQDRIEKILTFRIPYYIGPLAREKSDFAWMTRKTDDSIRPWNFEDLVDKEKSAEAFIHRMTNNDFYLPEEKVLPKHSLIYEKFTVYNELTKVRYKNEQGETYFFDSNIKQEIFDGVFKEHRKVSKKKLLDFLAKEYEEFRIVDVIGLDKENKAFNASLGTYHDLEKILDKDFLDNPDNESILEDIVQTLTLFEDREMIKKRLENYKDLFTESQLKKLYRRHYTGWGRLSAKLINGIRDKESQKTILDYLIDDGRSNRNFMQLINDDGLSFKSIISKAQAGSHSDNLKEVVGELAGSPAIKKGILQSLKIVDELVKVMGYEPEQIVVEMARENQTTNQ

SEQ ID NO: 1172 - protein, 1370 aa, Streptococcus agalactiae
MNKPYSIGLDIGTNSVGWSIITDDYKVPAKKMRVLGNTDKEYIKKNLIGALLFDGGNTAADRRLKRTARRRYTRRRNRILYLQEIFAEEMSKVDDSFFHRLEDSFLVEEDKRGSKYPIFATMQEEKDYHEKFPTIYHLRKELADKKEKADLRLVYLALAHIIKFRGHFLIEDDRFDVRNTDIQKQYQAFLEIFDTSFENNHLLSQNVDVEAILTDKISKSAKKDRILAQYPNQKSTGIFAEFLKLIVGNQADFKKHFNLEDKTPLQFAKDSYDEDLENLLGQIGDEFADLFSAAKKLYDSVLLSGILTVTDLSTKAPLSASMIQRYDEHREDLKQLKQFVKASLPEKYQEIFADSSKDGYAGYIEGKTNQEAFYKYLSKLLTKQEDSEYFLEKIKNEDFLRKQRTFDNGSIPHQVHLTELKAIIRRQSEYYPFLKENQDKIEKILTFRIPYYVGPLARGNSDFAWMTRKTDDSIRPWNFEDLVDKEKSAEAFIHRMTNNDLYLPEEKVLPKHSLIYEKFTVYNELTKVRYKNEQGETYFFDSNVKQEIFDGVFKEHRKVSKKQLLDFLAKEFEEFRIVDVTGLDKENKAFNASLGTYHDLKKILDKDFLDNPDNESILEDIVQTITLFEDREMIKKRLENYKDLFTESQLKKLYRRHYTGWGRLSAKLINGIRDRESQKTILDYLISDGRANRNFMQLINDDGLSFKSIISKAQSGSHSDNLKEVVGELAGSPAIKKGILQSLKIVDELVKVMGYEPEQIVVEMARENQTTNQGRRNSRQRYKLLEDGVKNLASDLNGDILKEYPTDNQALQNERLFLYYLQNGRDMYTGEALDIDNLSQYDIDHIVPQAFIKDDSIDNRVLVSSAKNRGKSDDVPSIDIVKARKAFWKKLLDAKLISQRKYDNLTKAERGGLTPDDKAGFIQRQLVETRQITKHVARILDERFNNKVDDNNKPIRKVKIVTLKSNLVSNFRKEFGFYKIREVNNYHHAHDAYLNAVVAKAILTKYPQLEPEFVYGDYPKYNSYKTRKSATEKLFFYSNIMNFFKTKVTLADETVVVKDDIEVNNETGEIAWDKKKHFATVRKVLSYPQVNIVKKTEVQTGGFSKESILAHSNSDKLIPRKTKDIYLDPKKYGGFDSPIVAYSVLVLADIKKGKAQKLKTVKELIGITIMERERFEKNPSAFLESKGYLNIRTDKLIILPKYSLFELENGRRRLLASAGELQKGNELALPTQYMKFLYLASRYNESKGKPEEIEKKQEFVNQHVSYFDDILQLINDFSKRVILADANLEKINKLYSDNKDNTPVDELAKNIINLFTFTSLGAPAAFKFFDKSVDRKRYTSTKEVLDSTLIHQSITGLYETRIDLGKLGED

SEQ ID NO: 1173 - protein, 1370 aa, Streptococcus agalactiae
MNKPYSIGLDIGTNSVGWSIITDDYKVPAKKMRVLGNTDKEYIKKNLIGALLFDGGNTAADRRLKRTARRRYTRRRNRILYLQEIFAEEMSKVDDSFFHRLEDSFLVEEDKRGSKYPIFATMQEEKDYHEKFPTIYHLRKELADKKEKADLRLVYLALAHIIKFRGHFLIEDDRFDVRNTDIQKQYQAFLEIFDTSFENNHLLSQNVDVEAILTDKISKSAKKDRILAQYPNQKSTGIFAEFLKLIVGNQADFKKHFNLEDKTPLQFAKDSYDEDLENLLGQIGDEFADLFSAAKKLYDSVLLSGILTVTDLSTKAPLSAYMIQRYDEHREDLKQLKQFVKASLPEKYQEIFADSSKDGYAGYIEGKTNQEAFYKYLSKLLTKQEDSEYFLEKIKNEDFLRKQRTFDNGSIPHQVHLTELKAIIRRQSEYYPFLKENQDKIEKILTFRIPYYVGPLARGNSDFAWMTRKTDDSIRPWNFEDLVDKEKSAEAFIHRMTNNDLYLPEEKVLPKHSLIYEKFTVYNELTKVRYKNEQGETYFFDSNVKQEIFDGVFKEHRKVSKKQLLDFLAKEFEEFRIVDVTGLDKENKAFNASLGTYHDLKKILDKDFLDNPDNESILEDIVQTITLFEDREMIKKRLENYKDLFTESQLKKLYRRHYTGWGRLSAKLINGIRDRESQKTILDYLISDGRANRNFMQLINDDGLSFKSIISKAQSGSHSDNLKEVVGELAGSPAIKKGILQSLKIVDELVKVMGYEPEQIVVEMARENQTTNQGRRNSRQRYKLLEDGVKNLASDLNGDILKEYPTDNQALQNERLFLYYLQNGRDMYTGEALDIDNLSQYDIDHIVPQAFIKDDSIDNRVLVSSAKNRGKSDDVPSIDIVKARKAFWKKLLDAKLISQRKYDNLTKAERGGLTPDDKAGFIQRQLVETRQITKHVARILDERFNNKVDDNNKPIRKVKIVTLKSNLVSNFRKEFGFYKIREVNNYHHAHDAYLNAVVAKAILTKYPQLEPEFVYGDYPKYNSYKTRKSATEKLFFYSNIMNFFKTKVTLADETVVVKDDIEVNNETGEIAWDKKKHFATVRKVLSYPQVNIVKKTEVQTGGFSKESILAHSNSDKLIPRKTKDIYLDPKKYGGFDSPIVAYSVLVLADIKKGKAQKLKTVKELIGITIMERERFEKNPSAFLESKGYLNIRTDKLIILPKYSLFELENGRRRLLASAGELQKGNELALPTQYMKFLYLASRYNESKGKPEEIEKKQEFVNQHISYFDDILQLINDFSKRVILADANLEKINKLYSDNKDNTPVDELAKNIINLFTFTSLGAPAAFKFFDKSVDRKRYTSTKEVLDSTLIHQSITGLYETRIDLGKLGED

SEQ ID NO: 1174 - protein, 1378 aa, Streptococcus agalactiae
MNKPYSIGLDIGTNSVGWSIITDDYKVPAKKMRVLGNTDKEYIKKNLIGALLFDGGNTAADRRLKRTARRRYTRRRNRILYLQEIFAEEMSKVDDSFFHRLEDSFLVEEDKRGSKYPIFATMQEEKYYHEKFPTIYHLRKELADKKEKADLRLIYLALAHIIKFRGHFLIEDDRFDVRNTDIQKQYQAFLEIFDTTFENNDLLSQNVDVEAILTDKISKSAKKDRILARYPNQKSTGIFAEFLKLIVGNQADFKKHFNLEDKTPLQFAKDSYDEDLENLLGQIGDEFADLFSAAKKLYDSVLLSGILTVIDLSTKAPLSASMIQRYDEHHEDLKHLKQFVKASLPENYREVFADSSKDGYAGYIEGKTSQEAFYKYLLKLLTKQEGSEYLLEKIKNEDFLRKQRTFDNGSIPHQVHLTELRAIIRRQSEYYPFLKENLDRIEKILTFRIPYYVGPLAREKSDFAWMTRKTDDSIRPWNFEDLVDKEKSAEAFIHRMTNNDLYLPEEKVLPKHSLIYEKFTVYNELTKVRFLAEGFKDFQFLNRKQKETIFNSLFKEKRKVTEKDIISFLNKVDGYEGIAIKGIEKQFNASLSTYHDLKKILGKDFLDNTDNELILEDIIQTLTLFEDREMIKKRLDIYKDFFTESQLKKLYRRHYTGWGRLSAKLINGIRNKENQKTILDYLIDDGSANRNFMQLIKDAGLSFKPIIDKARTGSHSDNLKEVVGELAGSPAIKKGILQSLKIVDELVKVMGYEPEQIVVEMARENQTTAKGLSRSRQRLTTLRESLGNLKSNILEEKKPKYVKDQVENHHLSDDRLFLYYLQNGKDMYTDDELDIDNLSQYDIDHIIPQAFIKDDSIDNRVLVSSAKNRGKSDDVPSIEIVKARKMFWKNLLDAKLMSQRKYDNLTKAERGGLTSDDKARFIQRQLVETRQITKHVARILDERFNNELDSKGRRIRKVKIVTLKSNLVSNFRKEFGFYKIREVNNYHHAHDAYLNAVVAKAILTKYPQLEPEFVYGLYRRKKLSKIVREDKEEKYSEATRKMFFYSNLMNMFKRVVRLADGSIVVRPVIETGRYMGKTAWDKKKHFATVRKVLSYPQNNIVKKTEIQTGGFSKESILAHGNSDKLIPRKTKDIYLDPKKYGGFDSPIVAYSVLVVADIKKGKAQKLKTVTELLGITIMERSRFEKNTSAFLESKGYLNIRDDKLMILPKYSLFELENGRRRLLASAGELQKGNELALPTQFMKFLYLASRYNESKGKPEEIEKKQEFVNQHVSYFDDILQLINDFSNRVILADANLEKINKLYQDNKENIPVDELANNIINLFTFTSLGAPAAFKFFDKIVDRKRYTSTKEVLNSTLIHQSITGLYETRIDLGKLGEG

SEQ ID NO: 1175 - protein, 1370 aa, Streptococcus agalactiae
MNKPYSIGLDIGTNSVGWSIITDDYKVPAKKMRVLGNTDKEYIKKNLIGALLFDGGNTAADRRLKRTARRRYTRRRNRILYLQEIFAEEMSKVDDSFFHRLEDSFLVEEDKRGSKYPIFATMQEEKYYHEKFPTIYHLRKELADKKEKADLRLIYLALAHIIKFRGHFLIEDDRFDVRNTDIQKQYQAFLEIFDTTFENNDLLSQNVDVEAILTDKISKSAKKDRILARYPNQKSTGIFAEFLKLIVGNQADFKKHFNLEDKTPLQFAKDSYDEDLENLLGQIGDEFADLFSAAKKLYDSVLLSGILTVTDLSTKAPLSASMIQRYDEHREDLKQLKQFVKASLPEKYQEIFADSSKDGYAGYIEGKTNQEAFYKYLSKLLTKQEGSEYLLEKIKNEDFLRKQRTFDNGSIPHQVHLTELRAIIRRQSEYYPFLKENLDRIEKILTFRIPYYVGPLAREKSDFAWMTRKTDDSIRPWNFEDLVDKEKSAEAFIHRMTNNDLYLPEEKVLPKHSLIYEKFTVYNELTKVRFLAEGFKDFQFLNRKQKETIFNSLFKEKRKVTEKDIISFLNKVDGYEGIAIKGIEKQFNASLSTYHDLKKILGKDFLDNTDNELILEDIVQTLTLFEDREMIRKRLDIYKDFFTESQLKKLYRRHYTGWGRLSAKLINGIRNKENQKTILDYLIDDGSANRNFMQLIKDAGLSFKPIIDKARTGSHSDNLKEVVGELAGSPAIKKGILQSLKIVDELVKVMGYEPEQIVVEMARENQTTAKGLSRLRQRLTTLRESLANLKSNILEEKKPKYVKDQVENHHLSDDRLFLYYLQNGKDMYTDDELDIDNLSQYDIDHIIPQAFIKDDSIDNRVLVSSAKNRGKSDDVPSVEIVKDCKVFWKKLLDAKLMSQRKYDNLTKAERGGLTSDDKARFIQRQLVETRQITKHVARILDERFNNELDSKGRRIRKVKIVTLKSNLVSNFRKEFGFYKIREVNNYHHAHDAYLNAVVAKAILTKYPQLEPEFVYGDYPKYNSYKTRKSATEKLFFYSNIMNFFKTKVTLADGTVVVKDDIEVNNDTGEIVWDKKKHFATVRKVLSYPQVNIVKKTEIQTGGFSKESILAHGNSDKLIPRKTKDIYLDPKKYGGFDSPIVAYSVLVVADIKKGKAQKLKTVTELLGITIMERSRFEKNPSAFLESKGYLNIRDDKLMILPKYSLFELENGRRRLLASADELQKGNELALPTQFMKFLYLASRYNELKGKPEEIEQKQEFVVQHVSYFDDILQIINDFSNRVILADANLEKINKLYQDNKENIPVDELANNIINLFTFTSLGAPAAFKFFDKIVDRKRYTSTKEVLNSTLIHQSITGLYETRIDLGKLGED

SEQ ID NO: 1176 - protein, 1377 aa, Streptococcus agalactiae
MNKPYSIGLDIGTNSVGWSIITDDYKVPAKKMRVLGNTDKEYIKKNLIGALLFDGGNTAADRRLKRTARRRYTRRRNRILYLQEIFAEEMSKVDDSFFHRLEDSFLVEEDKRGSKYPIFATMQEEKYYHEKFPTIYHLRKELADKKEKADLRLVYLALAHIIKFRGHFLIEDDRFDVRNTDIQKQYQAFLEIFDTTFENNHLLSQNVDVEAILTDKISKSAKKDRILAQYPNQKSTGIFAEFLKLIVGNQADFKKHFNLEDKTPLQFAKDSYDEDLENLLGQIGDEFADLFSVAKKLYDSVLLSGILTVTDLSTKAPLSASMIQRYDEHHEDLKHLKQFVKASLPENYREVFADSSKDGYAGYIEGKTNQEAFYKYLLKLLTKQEGSEYFLEKIKNEDFLRKQRTFDNGSIPHQVHLTELRAIIRRQSEYYPFLKENQDRIEKILTFRIPYYVGPLAREKSDFAWMTRKTDDSIRPWNFEDLVDKEKSAEAFIHRMTNNDLYLPEEKVLPKHSLIYEKFTVYNELTKVRFLAEGFKDFQFLNRKQKETIFNSLFKEKRKVTEKDIISFLNKVDGYEGIAIKGIEKQFNASLSTYHDLKKILGKDFLDNTDNELILEDIVQTLTLFEDREMIKKCLDIYKDFFTESQLKKLYRRHYTGWGRLSAKLINGIRNKENQKTILDYLIDDGSANRNFMQLINDDDLSFKPIIDKARTGSHSDNLKEVVGELAGSPAIKKGILQSLKIVDELVKVMGYEPEQIVVEMARENQTTAKGLSRSRQRLTTLRESLANLKSNILEEKKPKYVKDQVENHHLSDDRLFLYYLQNGRDMYTKKALDIDNLSQYDIDHIIPQAFIKDDSIDNRVLVSSAKNRGKSDDVPSIEIVKARKMFWKNLLDAKLMSQRKYDNLTKAERGGLTSDDKARFIQRQLVETRQITKHVARILDERFNNEVDNGKKICKVKIVTLKSNLVSNFRKEFGFYKIREVNDYHHAHDAYLNAVVAKAILTKYPQLEPEFVYGMYRQKKLSKIVHEDKEEKYSEATRKMFFYSNLMNMFKRVVRLADGSIVVRPVIETGRYMGKTAWDKKKHFATVRKVLSYPQNNIVKKTEIQTGGFSKESILAHGNSDKLIPRKTKDIYLDPKKYGGFDSPIVAYSVLVVADIKKGKAQKLKTVTELLGITIMERSRFEKNPSAFLESKGYLNIRDDKLMILPKYSLFELENGRRRLLASAGELQKGNELALPTQFMKFLYLASRYNESKGKPEEIEKKQEFVNQHVSYFDDILQLINDFSKRVILADANLEKINKLYQDNKENIPVDELANNIINLFTFTSLGAPAAFKFFDKIVDRKRYTSTKEVLNSTLIHQSITGLYETRIDLGKLGED

SEQ ID NO: 1177 - protein, 1370 aa, Streptococcus agalactiae
  misc_feature (117)..(117): Xaa can be any naturally occurring amino acid
MNKPYSIGLDIGTNSVGWSIITDDYKVPAKKMRVLGNTDKEYIKKNLIGALLFDGGNTAADRRLKRTARRRYTRRRNRILYLQEIFAEEMSKVDDSFFHRLEDSFLVEEDKRGSKYXIFATLQEEKDYHEKFSTIYHLRKELADKKEKADLRLIYIALAHIIKFRGHFLIEDDSFDVRNTDISKQYQDFLEIFNTTFENNDLLSQNVDVEAILTDKISKSAKKDRILAQYPNQKSTGIFAEFLKLIVGNQADFKKYFNLEDKTPLQFAKDSYDEDLENLLGQIGDEFADLFSAAKKLYDSVLLSGILTVIDLSTKAPLSASMIQRYDEHREDLKQLKQFVKASLPEKYQEIFADSSKDGYAGYIEGKTNQEAFYKYLSKLLTKQEDSENFLEKIKNEDFLRKQRTFDNGSIPHQVHLTELKAIIRRQSEYYPFLKENQDRIEKILTFRIPYYIGPLAREKSDFAWMTRKTDDSIRPWNFEDLVDKEKSAEAFIHRMTNNDFYLPEEKVLPKHSLIYEKFTVYNELTKVRYKNEQGETYFFDSNIKQEIFDGVFKEHRKVSKKKLLDFLAKEYEEFRIVDVIGLDKENKAFNASLGTYHDLEKILDKDFLDNPDNESILEDIVQTLTLFEDREMIKKRLENYKDLFTESQLKKLYRRHYTGWGRLSAKLINGIRDKESQKTILDYLIDDGRSNRNFMQLINDDGLSFKSIISKAQAGSHSDNLKEVVGELAGSPAIKKGILQSLKIVDELVKVMGYEPEQIVVEMARENQTTNQGRRNSRQRYKLLDDGVKNLASDLNGNILKEYPTDNQALQNERLFLYYLQNGRDMYTGEALDIDNLSQYDIDHIIPQAFIKDDSIDNRVLVSSAKNRGKSDDVPSLEIVKDCKVFWKKLLDAKLMSQRKYDNLTKAERGGLTSDDKARFIQRQLVETRQITKHVARILDERFNNELDSKGRRIRKVKIVTLKSNLVSNFRKEFGFYKIREVNNYHHAHDAYLNAVVAKAILTKYPQLEPEFVYGDYPKYNSYKTRKSATEKLFFYSNIMNFFKTKVTLADGTVVVKDDIEVNNDTGEIVWDKKKHFATVRKVLSYPQNNIVKKTEIQTGGFSKESILAHGNSDKLIPRKTKDIYLDPKKYGGFDSPIVAYSVLVVADIKKGKAQKLKTVTELLGITIMERSRFEKNPSAFLESKGYLNIRADKLIILPKYSLFELENGRRRLLASAGELQKGNELALPTQFMKFLYLASRYNESKGKPEEIEKKQEFVNQHVSYFDDILQLINDFSKRVILADANLEKINKLYQDNKENISVDELANNIINLFTFTSLGAPAAFKFFDKIVDRKRYTSTKEVLNSTLIHQSITGLYETRIDLGKLGED

SEQ ID NO: 1178 - protein, 1370 aa, Streptococcus agalactiae
MNKPYSIGLDIGTNSVGYSVVTDDYKVPAKKMRVLGNTDKEYIKKNLIGALLFDGGNTASDRRLKRTARRRYTRRRNRILYLQEIFAEEMSKVDDSFFHRLEDSFLVEDDKRGSKYPIFATMQEEKDYHEKFPTIYHLRKELADKKEKADLRLVYLALAHIIKFRGHFLIEDDSFDVRNTDIQRQYQAFLEIFDTTFENNHLLSQNIDVEGILTDKISKSAKKDRILAQYPNQKSTGIFAEFLKLIVGNQADFKKHFNLEDKTPLQFAKDSYDEDLENLLGQIGDEFADLFSVAKKLYDSVLLSGILTVTDLSTKAPLSASMIQRYDEHREDLKQLKQFVKASLPEKYQEIFTDSSKDGYAGYIEGKTNQGAFYKYLSKLLTKQEGSEYFLEKIKNEDFLRKQRTFDNGSIPHQVHLTELKAIIRRQSEYYPFLKENLDRIEKILTFRIPYYVGPLAREKSDFAWMTRKTDDSIRPWNFEELVDKEASAEAFIHRMTNNDLYLPEEKVLPKHSLIYEKFTVYNELTKVRYKNEQGETYFFDSNIKQEIFDGVFKEHRKVSKKKLLDFLAKEYEEFRIVDVIGLDKENKAFNASLGTYHDLKKILDKDFLDNPDNESILEDIVQTLTLFEDREMIKKRLENYKDLFTESQLKKLYRRHYTGWGRLSAKLINGIRDKESQKTILDYLISDGRANRNFMQLIHDDGLSFKPIIDKAQAGSHSDNLKEVVGELAGSPAIKKGILQSLKIVDELVKVMGYEPEQVVVEMARENQTTNQGRRNTRQRYKLLEEGVKNLASDLNGNILKEYPTDNQALQNERLFLYYLQNGRDMYTGEALDIDNLSQYDIDHIVPQAFIKDDSIDNRVLVSSAKNRGKSDNVPSIDIVKARKAFWKKLLDAKLMSQRKYDNLTKAERGGLTSDDKARFIQRQLVETRQITKHVARILDERFNNELDSKGRRIRKVKIVTLKSNLVSNFRKEFGFYKIREVNDYHHAHDAYLNAVVAKAILTKYPQLEPEFVYGDYPKYNSYKTRKSATEKLFFYSNIMNFFKTKVTLADGTVVVKDDIEVNNDTGEIVWDKKKHFATVRKVLSYPQVNIVKKTEIQTGGFSKESILAHGNSDKLIPRKTKDIYLDPKKYGGFDSPIVAYSVLVVADIKKGKAQKLKTVTELLGITIMERFRFEKNPSAFLESKGYLNIRDDKLMILPKYSLFELENGRRRLLASAGELQKGNELALPTQYMKFLYLASRYNELKGKPEEIEQKQEFVVQHVSYFDDILQIINDFSNRVILADANLEKINKLYQDNKENISVDELANNIINLFTFTSLGAPAAFKFFDKIVDRKRYTSTKEVLNSTLIHQSITGLYETRIDLGKLGED

SEQ ID NO: 1179 - protein, 1370 aa, Streptococcus agalactiae
MNKPYSIGLDIGTNSVGYSVVTDDYKVPAKKMRVLGNTDKEYIKKNLIGALLFDGGNTASDRRLKRTARRRYTRRRNRILYLQEIFAEEMSKVDDSFFHRLEDSFLVEDDKRGSKYPIFATMQEEKDYHEKFPTIYHLRKELADKKEKANLRLVYLALAHIIKFRGHFLIEDDSFDVRNTDIQRQYQAFLEIFDTTFENNHLLSQNIDVEGILTDKISKSAKKDRILAQYPNQKSTGIFAEFLKLIVGNQADFKKHFNLEDKTPLQFAKDSYDEDLENLLGQIGDEFADLFSVAKKLYDSVLLSGILTVTDLSTKAPLSASMIQRYDEHREDLKQLKQFVKASLPEKYQEIFTDSSKDGYAGYIEGKTNQGAFYKYLSKLLTKQEGSEYFLEKIKNEDFLRKQRTFDNGSIPHQVHLTELKAIIRRQSEYYPFLKENLDRIEKILTFRIPYYVGPLAREKSDFAWMTRKTDDSIRPWNFEELVDKEASAEAFIHRMTNNDLYLPEEKVLPKHSLIYEKFTVYNELTKVRYKNEQGETYFFDSNIKQEIFDGVFKEHRKVSKKKLLDFLAKEYEEFRIVDVIGLDKENKAFNASLGTYHDLKKILDKDFLDNPDNESILEDIVQTLTLFEDREMIKKRLENYKDLFTESQLKKLYRRHYTGWGRLSAKLINGIRDKESQKTILDYLISDGRANRNFMQLIHDDGLSFKPIIDKAQAGSHSDNLKEVVGELAGSPAIKKGILQSLKIVDELVKVMGYEPEQVVVEMARENQTTNQGRRNTRQRYKLLEEGVKNLASDLNGNILKEYPTDNQALQNERLFLYYLQNGRDMYTGEALDIDNLSQYDIDHIVPQAFIKDDSIDNRVLVSSAKNRGKSDNVPSIDIVKARKAFWKKLLDAKLMSQRKYDNLTKAERGGLTSDDKARFIQRQLVETRQITKHVARILDERFNNELDSKGRRIRKVKIVTLKSNLVSNFRKEFGFYKIREVNDYHHAHDAYLNAVVAKAILTKYPQLEPEFVYGDYPKYNSYKTRKSATEKLFFYSNIMNFFKTKVTLADGTVVVKDDIEVNNDTGEIVWDKKKHFATVRKVLSYPQVNIVKKTEIQTGGFSKESILAHGNSDKLIPRKTKDIYLDPKKYGGFDSPIVAYSVLVVADIKKGKAQKLKTVTELLGITIMERFRFEKNPSAFLESKGYLNIRDDKLMILPKYSLFELENGRRRLLASAGELQKGNELALPTQYMKFLYLASRYNELKGKPEEIEQKQEFVVQHVSYFDDILQIINDFSNRVILADANLEKINKLYQDNKENISVDELANNIINLFTFTSLGAPAAFKFFDKIVDRKRYTSTKEVLNSTLIHQSITGLYETRIDLGKLGED

SEQ ID NO: 1180 - protein, 1370 aa, Streptococcus agalactiae
  misc_feature (9)..(9): Xaa can be any naturally occurring amino acid
MNKPYSIGXDIGTNSVGWSIITDDYKVPAKKMRVLGNTDKEYIKKNLIGALLFDGGNTAADRRLKRTARRRYTRRRNRILYLQEIFAEEMSKVDDSFFHRLEDSFLVEEDKRGSKYPIFATLQEEKDYHEKFSTIYHLRKELADKKEKADLRLIYIALAHIIKFRGHFLIEDDSFDVRNTDISKQYQDFLEIFNTTFENNDLLSQNVDVEAILTDKISKSAKKDRILAQYPNQKSTGIFAEFLKLIVGNQADFKKYFNLEDKTPLQFAKDSYDEDLENLLGQIGDEFADLFSAAKKLYDSVLLSGILTVIDLSTKAPLSASMIQRYDEHREDLKQLKQFVKASLPEKYQEIFADSSKDGYAGYIEGKTNQEAFYKYLSKLLTKQEDSENFLEKIKNEDFLRKQRTFDNGSIPHQVHLTELKAIIRRQSEYYPFLKENQDRIEKILTFRIPYYIGPLAREKSDFAWMTRKTDDSIRPWNFEDLVDKEKSAEAFIHRMTNNDFYLPEEKVLPKHSLIYEKFTVYNELTKVRYKNEQGETYFFDSNIKQEIFDGVFKEHRKVSKKKLLDFLAKEYEEFRIVDVIGLDKENKAFNASLGTYHDLEKILDKDFLDNPDNESILEDIVQTLTLFEDREMIKKRLENYKDLFTESQLKKLYRRHYTGWGRLSAKLINGIRDKESQKTILDYLIDDGRSNRNFMQLINDDGLSFKSIISKAQAGSHSDNLKEVVGELAGSPAIKKGILQSLKIVDELVKVMGYEPEQIVVEMARENQTTNQGRRNSRQRYKLLDDGVKNLASDLNGNILKEYPTDNQALQNERLFLYYLQNGRDMYTGEALDIDNLSQYDIDHIIPQAFIKDDSIDNRVLVSSAKNRGKSDDVPSLEIVKDCKVFWKKLLDAKLMSQRKYDNLTKAERGGLTSDDKARFIQRQLVETRQITKHVARILDERFNNELDSKGRRIRKVKIVTLKSNLVSNFRKEFGFYKIREVNNYHHAHDAYLNAVVAKAILTKYPQLEPEFVYGDYPKYNSYKTRKSATEKLFFYSNIMNFFKTKVTLADGTVVVKDDIEVNNDTGEIVWDKKKHFATVRKVLSYPQNNIVKKTEIQTGGFSKESILAHGNSDKLIPRKTKDIYLDPKKYGGFDSPIVAYSVLVVADIKKGKAQKLKTVTELLGITIMERSRFEKNPSAFLESKGYLNIRADKLIILPKYSLFELENGRRRLLASAGELQKGNELALPTQFMKFLYLASRYNESKGKPEEIEKKQEFVNQHVSYFDDILQLINDFSKRVILADANLEKINKLYQDNKENISVDELANNIINLFTFTSLGAPAAFKFFDKIVDRKRYTSTKEVLNSTLIHQSITGLYETRIDLGKLGED

SEQ ID NO: 1181 - protein, 1125 aa, Streptococcus anginosus
MNGLVLGLDIGIASVGVGILNKETGEIIHANSRIFPAATADSNVERRGFRQGRRLGRRKKHRSARLNNLFEEFGFITDFSAIPLNLNPYALRVKGLSEELTNEELFIALKNIIKRRGISYLDDASEDGETASNEYGKAVEENRKLLADKTPGQIQLERFEKYGQVRGDFTVVENGENHRLINVFSTSAYKKEAERILRRQQEFNVRISDEFIEAYLTILTGKRKYYHGPGNEKSRTDYGRFRTDGTTLDNIFGILIGKCTFYPDEYRAAKASYTAQEFNLLNDLNNLTVPTETKKLSPEQKRQIVEYARTAKTLGTPTLLKYIAKLVDGSIDDIKGYRIDKSDKPEMHTFDAYRKMRTLDLVNIDALSRETLDDLAHILTLNTESEGILEALNSKMPSTFTKEQIDELIQFRKKNSAVFGKGWHNFSLKLMNELISELYETSEEQMTILTRLGKQRSREISKRTKYIDEKELTEEIYNPVVAKSVRQAIKIINEATKRYGIFDNIVIEMARENNEEDAKKDYIKRQKANQDEKNASMEKAAFQYNGKKELPDSIFHGHKELATKIRLWHQQGERCLYTGKNISIRDLIHNPHQYEIDHILPLSLSFDDGLANKVLVLATANQEKGQRTPFQAIDSMDDAWSYREFKQYVRNSKSLSNKKKDYLLTEEDISKIEVKQKFIERNLVDTRYSSRVVLNTLQEFYKTNDFDTKISVVRGQFTSQLRRKWKIEKSRDTYHHHAVDALIIAASSQLRLWKKQNNPLISYKEGQFVDPETGEILSLTDDEYKELVFRPPYDYFVDTLKSKSFEDSILFSYQVDSKYNRKISDATIYGTRKAQLGKDKQEETYVLGKIKDIYSQKGYEDFIKRYNKDETQFLIYHKDPQTFEKVIEEILKTYPDKELNEKGKEIPCNPFEKYRQENGPIRKYSKKGKGPEIKSLKYYDNKLGNHIDITPVNSQNQVVLQSLKPWRTDVYFNPRTSKYELMGLKYSDLRFEKGSGSYGISPEKYNKVKAKEGVNEDSEFKFTLYKNDLILIKDTETGEQQLFRYGSRNDTSKHYVELKPYEKAKFEGNQQLMNLLGTVAKGGQCLKGINKPNLSIYKVKTDVLGNKYFIKKEGDQPQLNFKKKF

SEQ ID NO: 1182 - protein, 1386 aa, Streptococcus anginosus
MNQKYSIGLDIGTNSVGWAVITDDYKVPAKKMKVLGNTDKQSIKKNLLGALLFDSGETAEATRLKRTARRRYTRRRNRLRYLQEIFAEEMMQVDESFFQRLDDSFLVDEDKRGERHPIFGNIAAEVKYHDEFPTIYHLRKHLADISQKADLRLVYLALAHMIKFRGHFLIEGQLKAENTNVQALFKDFVEVYDKTVEESHLSEITVDALSILTEKVSKSRRLENLIAHYPAEKKNTLFGNLIALFLGLQPNFKTNFQLSEDAKLQFSKDTYEEDLEGLLGEVGDEYADLFASAKNLYDAILLSGILTVDDNSTKAPLSASMVKRYEEHQKDLKKFEDFIKVNALDQYNAIFKDKNKKGYAGYIESGVKQDEFYKYLKGILLQINGSGDFLDKIDREDFLRKQRTFDNGSIPHQIHLQEMHAILRRQGEHYPFLKENQDKIEKILTFRIPYYVGPLARKGSRFAWAEYKADEKITPWNFDDILDKEKSAEKFITRMTLNDLYLPEEKVLPKHSLLYETFTVYNELTKVKYVNEQGEAKFFDANMKQEIFDHVFKENRKVTKDKLLNYLNKEFEEFRIVNLTGLDKENKVFNSSLGTYHDLRKILNKSFLDNKENAQIIEDIIQTLTLFEDREMIRQRLQKYSDIFTKAQLKKLERRHYTGWGRLSYKLINGIRNKENKKTILDYLIDDGYANRNFMQLINDDALSFKEEIAKAQIIGDVDDIANVVHDLPGSPAIKKGILQSVKIVDELVKVMGHNPANIIIEMARENQTTDRGRRNSQQRLKLLQDSLKNLDNPVNIKNVENQQLQNDRLFLYYIQNGKDMYTGETLDINNLSQYDIDHIIPQAYIKDDSFDNRVLTSSSENRGKSDNVPSIEVVCARKADWMRLRKAGLISQRKFDNLTKAERGGLTENDKAGFIKRQLVETRQITKHVAQVLDARFNAKHDENKKVIRDVKIITLKSNLVSQFRKDFKFYKVREINDYHHAHDAYLNAVIGTALLKKYPKLASEFVYGEFKKYDVRKFIAKSDKEIGKATAKYFFYSNLMNFFKKEVKFADGTVVERPDIETSEDGEIAWNKQTDFKIVRKVLSYPQVNIVKKTEVQTHGLDRGKPRGLFNANPSPKPKPDSSENLVGVKRNLDPKKYGGYAGISNSYAVLVKAIIEKGVKKKETMVLEFQGISILDRITFEKDKRAFLLGKGYKDIKKIIELPKYSLFELKDGSRRMLASILSTNNKRGEIHKGNELFVPQKFTTLLYHAKRINNPINKDHIEYVKKHRDDFKELLNYVLEFNEKYVGATKNGERLKEAVADFDSKSNEEICTSFLGAVNSKNAGLFELTSLGSASDFEFLGVKIPRYRDYTPSSLLKDSTLIHQSITGLYETRIDLSKLGED

SEQ ID NO: 1183 - protein, 1396 aa, Streptococcus anginosus
MTKPYSIGLDIGTNSVGWAVITDDYKVPAKKMKVLGNTNRDYIKKNLLGALLFDGGETAEGRRLKRTARRRYTRRKNRLRYLQEIFAEEMMQVDESFFQRLDDSFLVEEDKQGSKYPIFGTLKEEKEYHKKFKTIYHLREELANSKEKADLRLVYLALAHMIKFRGHFLYEGDLKAENTDVQALFKDFVEEYDKTIEESHLSEITVDALSILTEKVSKSSRLENLIAHYPTEKKNTLFGNLIALSLGLQANFKTNFQLSEDAKLQFSKDTYEEDLEGLLGEVGDEYADLFVSAKNLYDAILLSGILTVDDNSTKAPLSASMVKRYKEHKEELAAFKRFIKEKLPKKYEEIFKDDTKNGYAGYVGADKKLRKRSGKLATEEEFYKYVKGILNKVEGADYFLDKIDREDFLRKQRTFDNGSIPHQIHLQEMHAILRRQGEHYPFLKENQDKIEKILTFRIPYYVGPLARKGSRFAWAEYKADEKITPWNFDDILDKEKSAEKFITRMTLNDLYLPEEKVLPKHSPLYETFTVYNELTKVKYVNEQGEAKFFDTNMKQEIFDHVFKENRKVTKDKLLNYLNKEFEEFRIVNLTGLDKENKAFNASLGTYHDLRKILDKSFLDDKVNEKIIEDIIQTLTLFEDREMIRQRLQKYSDIFTTQQLKELERRHYTGWGRLSYKLINGIRNKENKKTILDYLIDDGYANRNFMQLINDDALSFKEEIARAQIIGDVDDIANVVHDLPGSPAIKKGILQSVKIVDELVKVMGHNPTNIIIEMARENQTTDKGRRNSQQRLKLLQDSLKNLDNPVNIKNVENQQLQNDRLFLYYIQNGKDMYTGETLDINNLSQYDIDHIIPQAFIKDNSLDNRVLTRSDKNRGKSDDVPSIEVVHEMKSFWSKLLSVKLITQRKFDNLTKAERGGLTENDKAGFIKRQLVETRQITKHVAQVLDARFNAKHDENKKVIRDVKIITLKSNLVSQFRKDFKFYKVREINDYHHAHDAYLNAVIGTALLKKYPKLASEFVYGEFKKYDVRKFIAKSDKEIGKATAKYFFYSNLMNFFKKEVKFADGTVVERPDIETSEDGEIAWNKQTDFKIVRKVLSYPQVNIVKKTEVQTHGLDRGKPRGLFNANPSPKPKPDSSENLVGIKRNLDPKKYGGYAGISNSYAVLVKAIIEKGVKKKETMVLEFQGISILDRITFEKDKRAFLLGKGYKDIKKIIELPKYSLFELKDGSRRMLASILSTNNKRGEIHKGNELFVPQKFTTLLYHAKRINNPINKDHIEYVKKHRDDFKELLNYVLEFNEKYVGATKNGERLKEAVADFDSKSNEEICTSFLGAVNSKNAGLFELTSLGSASDFEFLGVKIPRYRDYTPSSLLKDSILIHQSITGLYETRIDLSKLGED

SEQ ID NO: 1184 - protein, 1375 aa, Streptococcus canis
MEKKYSIGLDIGTNSVGWAVITDDYKVPSKKFKVLGNTNRKSIKKNLMGALLFDSGETAEATRLKRTARRRYTRRKNRIRYLQEIFANEMAKLDDSFFQRLEESFLVEEDKKNERHPIFGNLADEVAYHRNYPTIYHLRKKLADSPEKADLRLIYLALAHIIKFRGHFLIEGKLNAENSDVAKLFYQLIQTYNQLFEESPLDEIEVDAKGILSARLSKSKRLEKLIAVFPNEKKNGLFGNIIALALGLTPNFKSNFDLTEDAKLQLSKDTYDDDLDELLGQIGDQYADLFSAAKNLSDAILLSDILRSNSEVTKAPLSASMVKRYDEHHQDLALLKTLVRQQFPEKYAEIFKDDTKNGYAGYVGIGIKHRKRTTKLATQEEFYKFIKPILEKMDGAEELLAKLNRDDLLRKQRTFDNGSIPHQIHLKELHAILRRQEEFYPFLKENREKIEKILTFRIPYYVGPLARGNSRFAWLTRKSEEAITPWNFEEVVDKGASAQSFIERMTNFDEQLPNKKVLPKHSLLYEYFTVYNELTKVKYVTERMRKPEFLSGEQKKAIVDLLFKTNRKVTVKQLKEDYFKKIECFDSVEIIGVEDRFNASLGTYHDLLKIIKDKDFLDNEENEDILEDIVLTLTLFEDREMIEERLKTYAHLFDDKVMKQLKRRHYTGWGRLSRKMINGIRDKQSGKTILDFLKSDGFSNRNFMQLIHDDSLTFKEEIEKAQVSGQGDSLHEQIADLAGSPAIKKGILQTVKIVDELVKVMGHKPENIVIEMARENQTTTKGLQQSRERKKRIEEGIKELESQILKENPVENTQLQNEKLYLYYLQNGRDMYVDQELDINRLSDYDVDHIVPQSFIKDDSIDNKVLTRSVENRGKSDNVPSEEVVKKMKNYWRQLLNAKLITQRKFDNLTKAERGGLSEADKAGFIKRQLVETRQITKHVARILDSRMNTKRDKNDKPIREVKVITLKSKLVSDFRKDFQLYKVRDINNYHHAHDAYLNAVVGTALIKKYPKLESEFVYGDYKVYDVRKMIAKSEQEIGKATAKRFFYSNIMNFFKTEVKLANGEIRKRPLIETNGETGEVVWNKEKDFATVRKVLAMPQVNIVKKTEVQTGGFSKESILSKRESAKLIPRKKGWDTRKYGGFGSPTVAYSILVVAKVEKGKAKKLKSVKVLVGITIMEKGSYEKDPIGFLEAKGYKDIKKELIFKLPKYSLFELENGRRRMLASATELQKANELVLPQHLVRLLYYTQNISATTGSNNLGYIEQHREEFKEIFEKIIDFSEKYILKNKVNSNLKSSFDEQFAVSDSILLSNSFVSLLKYTSFGASGGFTFLDLDVKQGRLRYQTVTEVLDATLIYQSITGLYETRTDLSQLGGD

SEQ ID NO: 1185 - protein, 1345 aa, Streptococcus constellatus
MGKPYSIGLDIGTNSVGWAVVTDDYKVPAKKMKVLGNTDKQSIKKNLLGALLFDSGETAEATRLKRTARRRYTRRKNRLRYLQEIFTGEMNKVDENFFQRLDDSFLVDEDKRGEHHPIFGNIAAEVKYHDDFPTIYHLRRHLADTSKKADLRLVYLALAHMIKFRGHFLYEGDLKAENTDVQALFKDFVEEYDKTIEESHLSEITVDALSILTEKVSKSSRLENLIAHYPTEKKNTLFGNLIALSLDLHPNFKTNFQLSEDAKLQFSKDTYEEDLEGFLGEVGDEYADLFASAKNLYDAILLSGILTVDDNSTKAPLSASMVKRYEEHQKDLKKLKDFIKVNAPDQYNAIFKDKNKKGYASYIESGVKQDEFYKYLKGILLKINGSGDFLDKIDREDFLRKQRTFDNGSIPHQIHLQEMHAILRRQGEHYPFLKENQDKIEKILTFRIPYYVGPLARKGSRFAWAEYKADEKITPWNFDDILDKEKSAEKFITRMTLNDLYLPEEKVLPKHSPLYEAFTVYNELTKVKYVNEQGEAKFFDTNMKQEIFDHVFKENRKVTKDKLLNYLNKEFEEFRIVNLTGLDKENKAFNSSLGTYHDLRKILDKSFLDDKANEKTIEDIIQTLTLFEDREMIRQRLQKYSDIFTKAQLKKLERRHYTGWGRLSYKLINGIRNKENKKTILDYLIDDGYANRNFMQLINDDALSFKEEIARAQIIDDVDDIANVVHDLPGSPAIKKGILQSVKIVDELVKVMGHNPANIIIEMARENQTTDKGRRNSQQRLKLLQDSLKNLDNPVNIKNVENQQLQNDRLFLYYIQNGKDMYTGETLDINNLSQYDIDHIIPQAFIKDNSLDNRVLTRSDKNRGKSDDVPSIEVVHEMKSFWSKLLSVKLITQRKFDNLTKAERGGLTEEDKAGFIKRQLVETRQITKHVAQILDERFNTEFDGNKRRIRNVKIITLKSNLVSNFRKEFELYKVREINDYHHAHDAYLNAVVGNALLLKYPQLEPEFVYGEYPKYNSYRSRKSATEKFLFYSNILRFFKKEDIQTNEDGEIAWNKEKHIKILRKVLSYPQVNIVKKTEEQTGGFSKESILPKGESDKLIPRKTKNSYWDPKKYGGFDSPVVAYSILVFADVEKGKSKKLRKVQDMVGITIMEKKRFEKNPVDFLEQRGYRNVRLEKIIKLPKYSLFELENKRRRLLASAKELQKGNELVIPQRFTTLLYHSYRIEKDYEPEHREYVEKHKDEFKELLEYISVFSRKYVLADNNLTKIEMLFSKNKDAEVSSLAKSFISLLTFTAFGAPAAFNFFGENIDRKRYTSVTECLNATLIHQSITGLYETRIDLSKLGED

SEQ ID NO: 1186 - protein, 538 aa, Streptococcus dysgalactiae
DYDVDHIVPQSFIKDDSIDNKVLTRSDKNRGKSDNVPSEEVVKKMKNYWRQLLNAKLITQRKFDNLTKAERGGLSELDKAGFIKRQLVETRQITKHVAQILDSRMNTKYDENDKLIREVKVITLKSKLVSDFRKDFQFYKVREINNYHHAHDAYLNAVVGTALIKKYPKLESEFVYGDYKVYDVRKMIAKSEQEIGKATAKRFFYSNIMNFFKTEITLANGEIRKRPLIETNEETGEIVWDKGRDFATVRKVLSMPQVNIVKKTEVQTGALTNESIYARGSFDKLISRKHRFESSKYGGFGSPTVTYSVLVVAKSKVQDGKVKKIKTGKELIGITLLDKLVFEKNPLKFIEDKGYGNVQIDKCIRLPKYSLFEFENGTRRMLASVMANNNSRGDLQKANEMFLPAKLVTLLYHAHKIESSKELEHEAYILDHYNDLYQLLSYIERFASLYVDVEKNISKVKELFSNIESYSISEICSSVINLLTLTASGAPADFKFLGTTIPRKRYGSPQSILSSTLIHQSITGLYETRIDLSQLGGD

SEQ ID NO: 1187 - protein, 1155 aa, Streptococcus dysgalactiae
MDKKYSIGLDIGTNSVGWAVITDDYKVPSKKFKVLGNTDRHSIKKNLIGALLFDSGETAEATRLKRSARRRYTRRKNRIRYLQEIFSSEMSKVDDSFFHRLEESFLVEEDKKHERHPIFGNIVDEVAYHEKYPTIYHLRKKLADSTDKADLRLIYLALAHMIKFRGHFLIEGDLNPDNSDMDKLFIQLVQTYNQLFEENPINASRVDAKAILSARLSKSRRLENLIAQLPGEKRNGLFGNLIALSLGLTPNFKSNFDLAEDAKLQLSKDTYDDDLDNLLAQIGDQYADLFLAAKNLSDAILLSDILRVNSEITKAPLSASMIKRYDEHHQDLTLLKALVRQQLPEKYKEIFFDQSKNGYAGYIDGGASQEEFYKFIKPILEKMDGTEELLAKLNREDLLRKQRTFDNGSIPHQIHLGELHAILRRQEDFYPFLKDNREKIEKILTFRIPYYVGPLARGNSRFAWMTRKSEETITPWNFEEVVDKGASAQSFIERMTNFDKNLPNEKVLPKHSLLYEYFTVYNELTKVKYVTEGMRKPEFLSGKQKEAIVDLLFKTNRKVTVKQLKEDYFKKIECFDSVEISGVEDRFNASLGTYHDLLKIIKDKDFLDNEENEDILEDIVLTLTLFEDKEMIEERLKTYAHLFDDKVMKQLKRRHYTGWGRLSRKLINGIRDKQSGKTILDFLKSDGFANRNFIQLIHDDSLTFKEAIQKAQVSGQGHSLHEQIANLAGSPAIKKGILQSVKVVDELVKVMGHKPENIVIEMARENQTTQKGQKNSRERMKRIEEGIKELGSQILKEHPVENTQLQNEKLYLYYLQNRRDMYVDQELDINRLSDYDVDHIVPQSFIKDDSIDNKVLTRSDKNRGKSDDVPSEEVVKKMKNYWRQLLNAKLITQRKFDNLTKAERGGLSELDKAGFIKRQLVETRQITKHVAQILDSRMNTKYDENDKLIREVKVITLKSKLVSDFRKDFQFYKVREINNYHHAHDAYLNAVVGTALIKKYPKLESEFVYGDYKVYDVRKMIAKSEQEIGKATAKRFFYSNIMNFFKTEITLANGEIRKRPLIETNEETGEIVWDKGRDFATVRKVLSMPQVNIVKKTEVQTGALTNESIYARGSFDKLISRKHRFESSKYGGFGSPTVTYSVLVVAKYQSYKMEK

SEQ ID NO: 1188 - protein, 1371 aa, Streptococcus dysgalactiae
MDKKYSIGLDIGTNSVGWAVITDDYKVPSKKFKVLGNTDRHSIKKNLIGALLFDSGETAEATRLKRTARRRYTRRKNRIRYLQEIFSSEMSKVDDSFFHRLEESFLVEEDKKHERHPIFGNIVDEVAYHEKYPTIYHLRKKLADSTDKADLRLIYLALAHMIKFRGHFLIEGDLNPDNSDMDKLFIQLVQTYNQLFEENPINASRVDAKAILSARLSKSRRLENLIAQLPGEKRNGLFGNLIALSLGLTPNFKSNFDLAEDAKLQLSKDTYDDDLDNLLAQIGDQYADLFLAAKNLSDAILLSDILRVNSEITKAPLSASMIKRYDEHHQDLTLLKALVRQQLPEKYKEIFFDQSKNGYAGYIDGGASQEEFYKFIKPILEKMDGTEELLAKLNREDLLRKQRTFDNGSIPHQIHLGELHAILRRQEDFYPFLKDNREKIEKILTFRIPYYVGPLARGNSRFAWMTRKSEETITPWNFEEVVDKGASAQSFIERMTNFDKNLPNEKVLPKHSLLYEYFTVYNELTKVKYVTEGMRKPEFLSGKQKEAIVDLLFKTNRKVTVKQLKEDYFKKIECFDSVEISGVEDRFNASLGTYHDLLKIIKDKDFLDNEENEDILEDIVLTLTLFEDKEMIEERLKTYAHLFDDKVMKQLKRRHYTGWGRLSRKLINGIRDKQSGKTILDFLKSDGFANRNFIQLIHDDSLTFKEAIQKAQVSGQGHSLHEQIANLAGSPAIKKGILQSVKVVDELVKVMGHKPENIVIEMARENQTTQKGQKNSRERMKRIEEGIKELGSQILKEHPVENTQLQNEKLYLYYLQNGRDMYVDQELDINRLSDYDVDHIVPQSFIKDDSIDNKVLTRSDKNRGKSDDVPSEEVVKKMKNYWRQLLNAKLITQRKFDNLTKAERGGLSELDKAGFIKRQLVETRQITKHVAQILDSRMNTKYDENDKLIREVKVITLKSKLVSDFRKDFQFYKVREINNYHHAHDAYLNAVVGTALIKKYPKLESEFVYGDYKVYDVRKMIAKSEQEIGKATAKRFFYSNIMNFFKTEITLANGEIRKRPLIETNEETGEIVWNKGRDFATVRKVLSMPQVNIVKKTEVQTGALTNESIYARGSFDKLISRKHRFESSKYGGFGSPTVTYSVLVVAKSKVQDGKVKKIKTGKELIGITLLDKLVFEKNPLKFIEDKGYGNVQIDKCIKLPKYSLFEFENGTRRMLASVMANNNSRGDLQKANEMFLPAKLVTLLYHAHKIESSKELEHEAYILDHYNDLYQLLSYIERFASLYVDVEKNISKVKELFSNIESYSISEICSSVINLLTLTASGAPADFKFLGTTIPRKRYGSPQSILSSTLIHQSITGLYETRIDLSQLGGD

SEQ ID NO: 1189 - protein, 1371 aa, Streptococcus dysgalactiae
MDKKYSIGLDIGTNSVGWAVITDDYKVPSKKFKVLGNTDRHSIKKNLIGALLFDSGETAEATRLKRTARRRYTRRKNRIRYLQEIFSSEMSKVDDSFFHRLEESFLVEEDKKHERHPIFGNIVDEVAYHEKYPTIYHLRKKLADSTDKADLRLIYLALAHMIKFRGHFLIEGDLNPDNSDMDKLFIQLVQTYNQLFEENPINASRVDAKAILSARLSKSRRLENLIAQLPGEKRNGLFGNLIALSLGLTPNFKSNFDLAEDAKLQLSKDTYDDDLDNLLAQIGDQYADLFLAAKNLSDAILLSDILRVNSEITKAPLSASMIKRYDEHHQDLTLLKALVRQQLPEKYKEIFFDQSKNGYAGYIDGGASQEEFYKFIKPILEKMDGTEELLAKLNREDLLRKQRTFDNGSIPHQIHLGELHAILRRQEDFYPFLKDNREKIEKILTFRIPYYVGPLARGNSRFAWMTRKSEETITPWNFEEVVDKGASAQSFIERMTNFDKNLPNEKVLPKHSLLYEYFTVYNELTKVKYVTEGMRKPEFLSGKQKEAIVDLLFKTNRKVTVKQLKEDYFKKIECFDSVEISGVEDRFNASLGTYHDLLKIIKDKDFLDNEENEDILEDIVLTLTLFEDKEMIEERLKKYANLFDDKVMKQLKRRHYTGWGRLSRKLINGIRDKQSGKTILDFLKSDGFANRNFMQLINDDSLTFKEAIQKAQVSGQGHSLHEQIANLAGSPAIKKGILQSVKVVDELVKVMGHKPENIVIEMARENQTTQKGQKNSRERMKRIEEGIKELGSQILKEHPVENTQLQNEKLYLYYLQNGRDMYVDQELDINRLSDYDVDHIVPQSFIKDDSIDNKVLTRSDKNRGKSDNVPSEEVVKKMKNYWRQLLNAKLITQRKFDNLTKAERGGLSELDKAGFIKRQLVETRQITKHVAQILDSRMNTKYDENDKLIREVKVITLKSKLVSDFRKDFQFYKVREINNYHHAHDAYLNAVVGTALIKKYPKLESEFVYGDYKVYDVRKMIAKSEQEIGKATAKRFFYSNIMNFFKTEITLANGEIRKRPLIETNEETGEIVWDKGRDFATVRKVLSMPQVNIVKKTEVQTGALTNESIYARGSFDKLISRKHRFESSKYGGFGSPTVTYSVLVVAKSKVQDGKVKKIKTGKELIGITLLDKLVFEKNPLKFIEDKGYGNVQIDKCIKLPKYSLFEFENGTRRMLASVMANNNSRGDLQKANEMFLPAKLVTLLYHAHKIESSKELEHEAYILDHYNDLYQLLSYIERFASLYVDVEKNISKVKELFSNIESYSISEICSSVINLLTLTASGAPADFKFLGTTIPRKRYGSPQSILSSTLIHQSITGLYETRIDLSQLGGD

SEQ ID NO: 1190 - protein, 1371 aa, Streptococcus dysgalactiae
MDKKYSIGLDIGTNSVGWAVITDDYKVPSKKFKVLGNTDRHSIKKNLIGALLFDSGETAEATRLKRTARRRYTRRKNRIRYLQEIFSSEMSKVDDSFFHRLEESFLVEEDKKHERHPIFGNIVDEVAYHEKYPTIYHLRKKLADSTDKADLRLIYLALAHMIKFRGHFLIEGDLNPDNSDVDKLFIQLVQTYNQLFEEKPINASGVDAKAILSARLSKSKRLENLIAQLPGEKKNGLFGNLIALSLGLTPNFKSNFDLAEDAKLQLSKDTYDDDLDNLLAQIGNQYADLFLAAKNLSDAILLSDILRVNSEITKAPLSASMIKRYDEHHQDLTLLKALVRQQLPEKYKEIFFDQSKNGYAGYIDGGASQEEFYKFIKPILEKMDGTEELLAKLNREDLLRKQRTFDNGSIPHQIHLGELHAILRRQEDFYPFLKDNREKIEKILTFRIPYYVGPLARGNSRFAWMTRKSEETITPWNFEEVVDKGASAQSFIERMTNFDKNLPNEKVLPKHSLLYEYFTVYNELTKVKYVTEGMRKPEFLSGKQKEAIVDLLFKTNRKVTVKQLKEDYFKKIECFDSVEISGVEDRFNASLGTYHDLLKIIKDKDFLDNEENEDILEDIVLTLTLFEDKEMIEERLKKYANLFDDKVMKQLKRRHYTGWGRLSRKLINGIRDKQSGKTILDFLKSDGFANRNFMQLINDDSLTFKEAIQKAQVSGQGHSLHEQIANLAGSPAIKKGILQSVKVVDELVKVMGHKPENIVIEMARENQTTQKGQKNSRERMKRIEEGIKELGSQILKEHPVENTQLQNEKLYLYYLQNGRDMYVDQELDINRLSDYDVDHIVPQSFIKDDSIDNKVLTRSDKNRGKSDNVPSEEVVKKMKNYWRQLLNAKLITQRKFDNLTKAERGGLSELDKAGFIKRQLVETRQITKHVAQILDSRMNTKYDENDKLIREVKVITLKSKLVSDFRKDFQFYKVREINNYHHAHDAYLNAVVGTALIKKYPKLESEFVYGDYKVYDVRKMIAKSEQEIGKATAKRFFYSNIMNFFKTEITLANGEIRKRPLIETNEETGEIVWDKGRDFATVRKVLSMPQVNIVKKTEVQTGALTNESIYARGSFDKLISRKHRFESSKYGGFGSPTVTYSVLVVAKSKVQDGKVKKIKTGKELIGITLLDKLVFEKNPLKFIEDKGYGNVQIDKCIKLPKYSLFEFENGTRRMLASVMANNNSRGDLQKANEMFLPAKLVTLLYHAHKIESSKELEHEAYILDHYNDLYQLLSYIERFASLYVDVEKNISKVKELFSNIESYSISEICSSVINLLTLTASGAPADFKFLGTTIPRKRYGSPQSILSSTLIHQSITGLYETRIDLSQLGGD

SEQ ID NO: 1191 - protein, 1370 aa, Streptococcus gallolyticus; identical to SEQ ID NO: 204

SEQ ID NO: 1192 - protein, 1375 aa, Streptococcus infantarius
MEKSYSIGLDIGTNSVGWAVITDDYKVPAKKMKVLGNTDKKYIKKNLLGALLFDSGETAEVTRLKRTARRRYTRRKNRLRYLQEIFAKEMTKVDESFFQRLEESFLTDDDKTFDSHPIFGNKAEEDAYHQKFPTIYHLRKYLADSQEKADLRLVYLALAHMIKYRGHFLIEGELNAENTDVQKLFNVFVETYDKIVDESHLSEIEVDASSILTEKVSKSRRLENLIKQYPTEKKNTLFGNLIALALGLQPNFKTNFKLSEDAKLQFSKDTYEEDLEELLGKVGDDYADLFISAKNLYDAILLSGILTVDDNSTKAPLSASMIKRYVEHHEDLEKLKEFIKINKLKLYHDIFKDKTKNGYAGYIDNGVKQDEFYKYLKTILTKIDDSDYFLDKIERDDFLRKQRTFDNGSIPHQIHLQEMHSILRRQGDYYPFLKENQAKIEKILTFRIPYYVGPLARKDSRFAWANYHSDEPITPWNFDEVVDKEKSAEKFITRMTLNDLYLPEEKVLPKHSHVYETFTVYNELTKIKYVNEQGESFFFDANMKQEIFDHVFKENRKVTKAKLLSYLNNEFEEFRINDLIGLDKDSKSFNASLGTYHDLKKILDKSFLDDKTNGQIIEDIVLTLTLFEDRDMIHERLQKYSDFFTSQQLKKLERRHYTGWGRLSYKLINGIRNKENNKTILDFLIDDGHANRNFMQLINDESLSFKTIIQEAQVVGDVDDIEAVVHDLPGSPAIKKGILQSVKIVDELVKVMGDNPDNIVIEMARENQTTGYGRNKSNQRLKRLQDSLKEFGSDILSKKKPSYVDSKVENSHLQNDRLFLYYIQNGKDMYTGEELDIDRLSDYDIDHIIPQAFIKDNSIDNKVLTSSAKNRGKSDDVPSIEIVRNRRSYWYKLYKSGLISKRKFDNLTKAERGGLTEADKAGFIKRQLVETRQITKHVAQILDARFNTKRDENDKVIRDVKVITLKSNLVSQFRKEFKFYKVREINDYHHAHDAYLNAVVGTALLKKYPKLTPEFVYGEYKKYDVRKLIAKSSDDYSEMGKATAKYFFYSNLMNFFKTEVKYADGRVFERPDIETNADGEVVWNKQKDFDIVRKVLSYPQVNIVKKVEAQTGGFSKESILSKGDSDKLIPRKTKKVYWNTKKYGGFDSPTVAYSVLVVADIEKGKAKKLKTVKELVGISIMERSFFEENPVSFLEKKGYHNVQEDKLIKLPKYSLFEFEGGRRRLLASATELQKGNEVMLPAHLVELLYHAHRIDSFNSTEHLKYVSEHKKEFEKVLSCVENFSNLYVDVEKNLSKVRAAAESMTNFSLEEISASFINLLTLTALGAPADFNFLGEKIPRKRYTSTKECLSATLIHQSVTGLYETRIDLSKLGEE

SEQ ID NO: 1193 - protein, 1368 aa, Streptococcus iniae
MRKPYSIGLDIGTNSVGWAVITDDYKVPSKKMRIQGTTDRTSIKKNLIGALLFDNGETAEATRLKRTTRRRYTRRKYRIKELQKIFSSEMNELDIAFFPRLSESFLVSDDKEFENHPIFGNLKDEITYHNDYPTIYHLRQTLADSDQKADLRLIYLALAHIIKFRGHFLIEGNLDSENTDVHVLFLNLVNIYNNLFEEDIVETASIDAEKILTSKTSKSRRLENLIAEIPNQKRNMLFGNLVSLALGLTPNFKTNFELLEDAKLQISKDSYEEDLDNLLAQIGDQYADLFIAAKKLSDAILLSDIITVKGASTKAPLSASMVQRYEEHQQDLALLKNLVKKQIPEKYKEIFDNKEKNGYAGYIDGKTSQEEFYKYIKPILLKLDGTEKLISKLEREDFLRKQRTFDNGSIPHQIHLNELKAIIRRQEKFYPFLKENQKKIEKLFTFKIPYYVGPLANGQSSFAWLKRQSNESITPWNFEEVVDQEASARAFIERMTNFDTYLPEEKVLPKHSPLYEMFMVYNELTKVKYQTEGMKRPVFLSSEDKEEIVNLLFKKERKVTVKQLKEEYFSKMKCFHTVTILGVEDRFNASLGTYHDLLKIFKDKAFLDDEANQDILEEIVWTLTLFEDQAMIERRLVKYADVFEKSVLKKLKKRHYTGWGRLSQKLINGIKDKQTGKTILGFLKDDGVANRNFMQLINDSSLDFAKIIKNEQEKTIKNESLEETIANLAGSPAIKKGILQSIKIVDEIVKIMGQNPDNIVIEMARENQSTMQGIKNSRQRLRKLEEVHKNTGSKILKEYNVSNTQLQSDRLYLYLLQDGKDMYTGKELDYDNLSQYDIDHIIPQSFIKDNSIDNTVLTTQASNRGKSDNVPNIETVNKMKSFWYKQLKSGAISQRKFDHLTKAERGALSDFDKAGFIKRQLVETRQITKHVAQILDSRFNSNLTEDSKSNRNVKIITLKSKMVSDFRKDFGFYKLREVNDYHHAQDAYLNAVVGTALLKKYPKLEAEFVYGDYKHYDLAKLMIQPDSSLGKATTRMFFYSNLMNFFKKEIKLADDTIFTRPQIEVNTETGEIVWDKVKDMQTIRKVMSYPQVNIVMKTEVQTGGFSKESIWPKGDSDKLIARKKSWDPKKYGGFDSPIIAYSVLVVAKIAKGKTQKLKTIKELVGIKIMEQDEFEKDPIAFLEKKGYQDIQTSSIIKLPKYSLFELENGRKRLLASAKELQKGNELALPNKYVKFLYLASHYTKFTGKEEDREKKRSYVESHLYYFDEIMQIIVEYSNRYILADSNLIKIQNLYKEKDNFSIEEQAINMLNLFTFTDLGAPSAFKFFNGDIDRKRYSSTNEIINSTLIYQSPTGLYETRIDLSKLGGK

SEQ ID NO: 1194 - protein, 1392 aa, Streptococcus mitis
MNNNNYSIGLDIGTNSVGWAVITDDYKVPSKKMKVLGNTDKHFIKKNLIGALLFDEGATAEDRRFKRTARRRYTRRKNRLRYLQEIFSEEMSKVDSSFFHRLDDSFLVPEDKRGSKYPIFATLAEEKEYHKKFPTIYHLRKHLADSKEKTDLRLIYLALAHMIKYRGHFLYEESFDIKNNDIQKIFSEFISIYDNTFEGSSLSGQNAQVEAIFTDKISKSAKRERILKLFAYEKSTDLFSEFLKLIVGNQADFKKHFDLEEKAPLQFSKDTYDEDLENLLGQIGDDFADLFLVAKKLYDAILLSGILTVTDSSTKAPLSASMIERYENHQKDLAALKQFIQNNLQEKYDEVFSDQSKDGYARYINGKTTQEAFYKYIKNLLSKFEGSDYFLDKIEREDFLRKQRTFDNGSIPHQIHLQEMNAIIRRQGEHYPFLKEYKEKIETILTFRIPYYVGPLARGNRNFAWLTRNSDQAIRPWNFEEIVDQASSAEEFINKMTNYDLYLPEEKVLPKHSLLYETFAVYNELTKVKFISEGLRDYQFLDSGQKKQIVNQLFKEKRKVTEKDIIQYLHNVDGYDGIELKGIEKQFNASLSTYHDLLKIIKDKEFMDDPKNEEILENIVHTLTIFEDREMIKQRLAQYASIFDKKVIKALTRRHYTGWGKLSAKLINGICDKKTGKTILDYLIDDGYSNRNFMQLINDDGLSFKDIIQKAQVVGKTNDVKQVVQELPGSPAIKKGILQSIKLVDELVKVMGHAPESIVIEIARENQTTARGKKNSQQRYKRIEDALKNLAPGLDSNILKEHPTDNIQLQNDRLFLYYLQNGKDMYTGEALDINQLSSYDIDHIVPQAFIKDDSLDNRVLTSSKDNRGKSDNVPSLEVVQKRKAFWQQLLDSKLISEHKFNNLTKAERGGLDERDKVGFIRRQLVETRQITKHVAQILDARFNTEVNEKDKKNRTVKIITLKSNLVSNFRKEFKLYKVREINDYHHAHDAYLNAVVAKAILKKYPKLEPGFVYGDYQKYDIKRYISRSKDPKEVEKATEKYFFYSNLLNFFKEEVHYADGTIVKRENIEYSKDTGEIAWNKEKDFATIKKVLSLPQVNIVKKTEIQTHGLDRGKPRGLFNSNPSPKPSEDRKENLVPIKQGLDPRKYGGYAGISNSYAVLVKAIIEKGAKKQQKTVLEFQGISILDKINFEKNKENYLLEKGYIKILSTITLPKYSLFEFPDGTRRRLASILSTNNKRGEIHKGNELVIPEKYTTLLYHAKNINKTLEPEHLEYVEKHRNDFAKLLEYVLNFNDKYVGALKNGERIRQAFIDWETVDIEKLCFSFIGPRNSKNAGLFELTSQGSASDFEFLGVKIPRYRDYTPSSLLNATLIHQSITGLYETRIDLSKLGED

SEQ ID NO: 1195 - protein, 1134 aa, Streptococcus mutans
MANGKILGLDIGIASVGVGIIDKETGKIIHVNSRIFPAATADSNVERRGFRQGRRLVRRKKHRKVRLADLFLDSNLLTDFSKVSLNLNPYQLRVKGLNEELSNEELFIALKSIVSRRGISYLDDASEDSGANSSEYGKAVEENRKLLEDRTPGQIQLERFEKYGKVRGDFTVVENGENHRLINVFSTSAYKKEAERILRRQQEFNMRIADEFIEAYLTILTGKRKYYHGPGNEKSRTDYGRFRTDGTTLDNIFGILIGKCTFYPDEYRAAKASYTAQEFNLLNDLNNLTVPTETKKLSEEQKRQIIEHAKTVKTLGAPTLLKYIVKLVGCSADDIKGYRIDKSDKPEIHTFEAYRKMRTMELIKVDDLSRESLDALAHILTLNTEREGIEEAIRDRFTNKEFNQEQINELVLFRKNNSSLFGKGWHNFSLKLMKELIPELYETSEEQMTILTRLGKQRVKKSSNRTNYIDEKELTEEIYNPVVAKSVRQAIKIINLATKKYGVFDNIVIEMARESNEDDEKKAIQNAQKANEDEKKAALLKAAHQFNGKEELPDSIFHGHKELLTKIRLWHQQGEKCLYTGKTIFINDLIHNPYKYEIDHILPLSLSFDDSLANKVLVLSTANQEKGQRTPFQSLDSMDGAWTYREFKSYVKGLKTLSNKKKDYLLTEENIDKIEVKQKFIERNLVDTRYSSRVVLNALQDFYKERKFDTKISVVRGQFTSQLRRKWRIEKTRETYHHHAVDALIIAASSQLNLWKKQNNPLISYKEDQFVDPETGEILSLSDDEYKKLVFKAPYEHFVDTLKSKKFEDSILFSYQVDSKYNRKISGATICGTRKAQLGKDTQEETYVLGKIKDIYSQKGYEDFIKKYKKDKTQFLMYHKDPQTFEKVIEEILKTYPDKELNEKGKEVSCNPFEKYRQENGPVRKYSKKGNGPEIKSLKYYDEVLGKNIDITPKNSLNKVVLRSLNPWRTDVYFNHETRKYEFLGLKYSDLRYLKGEHRYGILIGDYKKIKDKEGIEKESEFKFTLYKNDLILIKDTAKGKEELFRFWSRTGKDNAKTFEKNKIELKPYSKSQFEKGEDTNVLGKLYASSNQLQKSFGTLENLSIYKVRTDVLGNKYFIKKEGDKPQLNFKKKL

SEQ ID NO: 1196 - protein, 1134 aa, Streptococcus mutans; identical to SEQ ID NO: 1195

SEQ ID NO: 1197 - protein, 1128 aa, Streptococcus mutans
MANSKILGLDIGIASVGVGIIDKETGKIIHVNSRIFPAATADSNVERRGFRQGRRLVRRKKHRKVRLADLFLDSNLLTDFSKVSLNLNPYQLRVKGLNEELSNEELFIALKSIVSRRGISYLDDASEDSGANSSEYGKAVEENRKLLEDRTPGQIQLERFEKYGKVRGDFTVVENGENHRLINVFSTSAYKKEAERILRRQQEFNIRIADEFIEAYLTILTGKRKYYHGPGNEKSRTDYGRFRTDGTTLDNIFGILIGKCTFYPDEYRAAKASYTAQEFNLLNDLNNLTVPTETKKLSEEQKRQIIEHAKTVKTLGAPTLLKYIAKLVGCSADDIKGYRIDKSDKPEIHTFEAYRKMRTMELIKVADLSRESLDALAHILTLNTEREGIEEAIRDRFTNKEFNQEQINELVLFRKNNSSLFGKGWHNFSLKLMKELIPELYETSEEQMTILTRLGKQRVKKSSNRTNYIDEKELTEEIYNPVVAKSVRQAIKIINLATKKYGVFDNIVIEMARESNEDDEKKAIQNAQKANEDEKEAALLKAAHQFNGKEELPDSIFHGHKELLTKIRLWHQQGEKCLYTGKTIFINDLIHNPYKYEIDHILPLSLSFDDSLANKVLVLSTANQEKGQRTPFQSLDSMDGAWTYREFKAYVKGLKTLSNKKKDYLLNEEDINKNEVKQKFIERNLVDTRYSSRVVLNTLQDFYKKREFDTKISVVRGQFTSQIRRKWRIEKTRETYHHHAVDALIIAASSQLNLWKKQNNPLISYKEDQFVDPETGEILSLSDDEYKELVFKAPYDHFVDTLKSKKFEDSILFSYQVDSKYNRKISDATIYGTRKARLGKDSQEETYVLGKIKDIYSQKGYEDFIKKYKKDKTQFLMYHKDPQTFEKVIEEILKTYSDKELNEKGKEVPCNPFEKYRQENGPVRKYSKKGNGPEIKSIKYYDNKLGNHIDITPNNSHHQVVLQSLKPWRTDVYFNPKSGKYELMGLKYSDLRFEKVSGDYGISVKKYNEIKSKEGVDENSEFKFTLYKNDLILIKDTESGEQELFRFLSRTMPNQKHYVELKPYDKSKFEGHQKLMDIFGEVAKGGQCLKGLNKSNISIYKVKTDVLGNKYFIKKEGDQPQLNFKKKI

SEQ ID NO: 1198 - protein, 1128 aa, Streptococcus mutans; identical to SEQ ID NO: 1197

SEQ ID NO: 1199 - protein, 1338 aa, Streptococcus mutans
MDLIGTNSVGWAVVTDDYKVPAKKMKVLGNTDKSHIKKNLLGALLFDSGNTAADRRLKRTARRRYTRRRNRILYLQEIFAEEMSKVDDSFFHRLEDSFLVTEDKRGERHPIFGNLEEEVKYHENFPTIYHLRQYLADNPEKVDLRLVYLALAHIIKFRGHFLIEGKFDTRNNDVQRLFQEFLAVYDNTFENSSLQEQNVQVEEILTDKISKSAKKDRVLKLFPNEKSNGRFAEFLKLIVGNQADFKKHFELEEKAPLQFSKDTYEEELEVLLAQIGDNYAELFLSAKKLYDSILLSGILTVTDVSTKAPLSASMIQRYNEHQMDLAQLKQFIRQKLSDKYNEVFSDVSKDGYAGYIDGKTNQEAFYKYLKGLLNKIEGSGYFLDKIEREDFLRKQRTFDNGSIPHQIHLQEMRAIIRRQAEFYPFLADNQDRIEKILTFRIPYYVGPLARGKSDFAWLSRKSADKITPWNFDEIVDKESSAEAFINRMTNYDLYLPNQKVLPKHSLLYEKFTVYNELTKVKYKTEQGKTAFFDANMKQEIFDGVFKVYRKVTKDKLMDFLEKEFDEFRIVDLTGLDKENKAFNASYGTYHDLRKILDKDFLDNSKNEKILEDIVLTLTLFEDREMIRKRLENYSDLLTKEQVKKLERRHYTGWGRLSAELIHGIRNKESRKTILDYLIDDGNSNRNFMQLINDDALSFKEEIAKAQVIGETDNLNQVVSDIAGSPAIKKGILQSLKIVDELVKIMGHQPENIVVEMARENQFTNQGRRNSQQRLKGLTDSIKEFGSQILKEHPVEHSQLQNDRLFLYYLQNGRDMYTGEELDIDYLSQYDIDHIIPQAFIKDNSIDNRVLTSSKENRGKSDDVPSKNVVRKMKSYWSKLLSAKLITQRKFDNLTKAERGGLTDDDKAGFIKRQLVETRQITKHVARILDERFHTETDENNKKIRQVKIVTLKSNLVSNFRKEFELYKVREINDYHHAHDAYLNAVIGKALLGVYPQLEPEFVYGDYPHFHGHKENKATAKKFFYSNIMNFFKKDDVRTDKNGEIIWKKDEHISNIKKVLSYPQVNIVKKVEEQTGGFSKESILPKGNSDKLIPRKTKKFYWDTKKYGGFDSPIVAYSILVIADIEKGKSKKLKTVKALVGVTIMEKMTFERDPVAFLERKGYRNVQEENIIKLPKYSLFKLENGRKRLLASARELQKGNEIVLPNHLGTLLYHAKNIHKVDEPKHLDYVDKHKDEFKELLDVVSNFSKKYTLAEGNLEKIKELYAQNNGEDLKELASSFINLLTFTAIGAPATFKFFDKNIDRKRYTSTTEILNATLIHQSITGLYETRIDLSKLGGD

SEQ ID NO: 1200 - protein, 1338 aa, Streptococcus mutans; identical to SEQ ID NO: 1199

SEQ ID NO: 1201 - protein, 1345 aa, Streptococcus mutans
MKKPYSIGLDIGTNSVGWAVVTDDYKVPAKKMKVLGNTDKSHIEKNLLGALLFDSGNTAEDRRLKRTARRRYTRRRNRILYLQEIFSEEMGKVDDSFFHRLEDFFLVTEDKRGERHPIFGNLEEEVKYHENFPTIYHLRQYLADNPEKVDLRLVYLALAHIIKFRGHFLIEGKFDTRNNDVQRLFQEFLAVYDNTFENSSLQEQNVQVEEILTDKISKSAKKDRVLKLFPNEKSNGRFAEFLKLIVGNQADFKKHFELEEKAPLQFSKDTYEEELEVLLAQIGDNYAELFLSAKKLYDSILLSGILTADDSSTKAPLSASMIQRYNEHQMDLAQLKQFIRQKLSDKYNEVFSDVSKDGYAGYIDGKTNQEAFYKYLKGLLNKIEGSGYFLDKIEREDFLRKQRTFDNGSIPHQIHLQEMRAIIRRQSEFYPFLADNQDRIEKILTFRIPYYVGPLARGKSDFAWLSRKSADKITPWNFDEIVDKESSAEAFINRMTNYDLYLPNQKVLPKHSLLYEKFTVYNELTKVKYKTEQGETAFFDANMKQEIFDGVFKVYRKVTKDKLMDFLEKEFDEFRIVDLTGLDKENKAFNASYGTYHDLRKILDKDFLDNSKNEKILEDIVLTLTLFEDREMIRKRLKNYSDLLTKEQLKKLERRHYTGWGRLSAELIHGIRNKESRKTILDYLIDDGNSNRNFMQLINDDALSFKEEIAKAQVIGETDNLNQVVSDIAGSPAIKKGILQSLKIVDELVKIMGHQPENIVVEMARENQFTNQGRRNSQQRLKGLTDSIKEFGSQILKEHPVENSQLQNDRLFLYYLQNGRDMYTGEELDIDYLSQYDIDHIIPQAFIKDNSIDNRVLTSSKENRGKSDDVPSKDVVRKMKPYWSKLLSAKLITQRKFDNLTKAERGGLTDDDKAGFIKRQLVETRQITKHVARILDERFNTETDENNKKIRQVKIVTLKSNLVSNFRKEFELYKVREINDYHHAHDAYLNAVIGKALLGVYPQLEPEFVYGDYPHFHGHEENKATAKKFFYSNIMNFFKKDDVRTDKNGEIIWKKDEHISNIKKVLSYPQVNIVKKVEEQTGGFSKESILPKGNSDKLIPRKTKKFYWDTKKYGGFDSPIVAYSILVIADIEKGKSKKLKTVKALVGVTIMEKMTFERDPVAFLERKGYRNVQEENIIKLPKYSLFKLENGRKRLLASARELQKGNEIVLPNHLGTLLYHAKNIHKVDEPKHLDYVDKHKDEFKELLDVVSNFSKKYTLAEGNLEKIKELYAQNNGEDLKELASSFINLLTFTAIGAPATFKFFDKNIDRKRYTSTTEILNATLIHQSITGLYETRIDLSKLGGD

SEQ ID NO: 1202 - protein, 1345 aa, Streptococcus mutans; identical to SEQ ID NO: 1201

SEQ ID NO: 1203 - protein, 1229 aa, Streptococcus mutans
MKKPYSIGLDIGTNSVGWAVVTDDYKVPAKKMKVLGNTDKSHIEKNLLGALLFDSGNTAEDRRLKRTARRRYTRRRNRILYLQEIFSEEMGKVDDSFFHRLEDSFLVTEDKRGERHPIFGNLEEEVKYHENFPTIYHLRQYLADNPEKVDLRLVYLALAHIIKFRGHFLIEGKFDTRNNDVQRLFQEFLAVYDNTFENSSLQEQNIQVEEILTDKISKSAKKDRVLKLFPNEKSNGRFAEFLKLIVGNQADFKKHFELEEKAPLQFSKDTYEEELEVLLAQIGDNYAELFLSAKKLYDSILLSGILTVTDVGTKAPLSASMIQRYNEHQMDLTQLKQFIRQKLSDKYNEVFSDVSKDGYAGYIDGKTNQEAFYKYLKGLLNKIEGSGYFLDKIEREDFLRKQRTFDNGSIPHQIHLQEMRAIIRRQAEFYPFLADNQDRIEKILTFRIPYYVGPLARGKSDFAWLSRKSADKITPWNFDEIVDKESSAEAFINRMTNYDLYLPNQKVLPKHSLLYEKFTVYNELTKVKYKTEQGKTAFFDANMKQEIFDGVFKVYRKVTKDKLMDFLEKEFDEFRIVDLTGLDKENKVFNASYGTYHDLCKILDKDFLDNSKNEKILEDIVLTLTLFEDREMIRKRLENYSDLLTKEQVKKLERRHYTGWGRLSAELIHGIRNKESRKTILDYLIDDGNSNRNFMQLINDDALSFKEEIAKAQVIGETDNLNQVVSDIAGSPAIKKGILQSLKIVDELVKIMGHQPENIVVEMARENQFTNQGRRNSQQRLKGLTDSIKEFGSQILKEHPVENSQLQNDRLFLYYLQNGRDMYTGEELDIDYLSQYDIDHIIPQAFIKDNSIDNRVLTSSKENRGKSDDVPSKDVVRKMKPYWSKLLSAKLITQRKFDNLTKAERGGLTDDDKAGFIKRQLVETRQITKHVARILDERFNTETDENNKKIRQVKIVTLKSNLVSNFRKEFELYKVREINDYHHAHDAYLNAVIGKALLGVYPQLEPEFVYGDYPHFHGHEENKATAKKFFYSNIMNFFKKDDVRTDKNGEIIWKKDEHISNIKKVLSYPQVNIVKKVEEQTIGQNGGLFDDNPKSPLEVIPSKLVPLKKALNPEKYGGYQKPTTAYPILLIVDTKQLIPISVMDKKRFEQNPVKFLKDKGYQQIEKNNFVKLPKYTLVDIGNGIKRLWASSKEVHKGNQLVVSKKSQDLLYHAHHLDNDYSNEYVKNHY

SEQ ID NO: 1204 - protein, 1229 aa, Streptococcus mutans; identical to SEQ ID NO: 1203

SEQ ID NO: 1205 - protein, 1345 aa, Streptococcus mutans
MKKPYSIGLDIGTNSVGWAVVTDDYKVPAKKMKVLGNTDKSHIEKNLLGALLFDSGNTAEDRRLKRTARRRYTRRRNRILYLQEIFSEEMGKVDDSFFHRLEDSFLVTEDKRGERHPIFGNLEEEVKYHENFPTIYHLRQYLADNPEKVDLRLVYLALAHIIKFRGHFLIEGKFDTRNNDVQRLFQEFLAVYDNTFENSSLQEQNVQVEEILTDKISKSAKKDRVLKLFPNEKSNGRFAEFLKLIVGNQADFKKHFELEEKAPLQFSKDTYEEELEVLLAQIGDNYAELFLSAKKLYDSILLSGILTVTDVGTKAPLSASMIQRYNEHQMDLAQLKQFIRQKLSDKYNEVFSDVSKDGYAGYIDGKTNQEAFYKYLKGLLNKIEGSGYFLDKIEREDFLRKQRTFDNGSIPHQIHLQEMRAIIRRQAEFYPFLADNQDRIEKLLTFRIPYYVGPLARGKSDFAWLSRKSADKITPWNFDEIVDKESSAEAFINRMTNYDLYLPNQKVLPKHSLLYEKFTVYNELIKVKYKTEQGKTAFFDANMKQEIFDGVFKVYRKVTKDKLMDFLEKEFDEFRIVDLTGLDKENKVFNASYGTYHDLCKILDKDFLDNSKNEKILEDIVLTLTLFEDREMIRKRLENYSDLLTKEQVKKLERRHYTGWGRLSAELIHGIRNKESRKTILDYLIDDGNSNRNFMQLINDDALSFKEEIAKAQVIGETDNLNQVVSDIAGSPAIKKGILQSLKIVDELVKIMGHQPENIVVEMARENQFTNQGRRNSQQRLKGLTDSIKEFGSQILKEHPVENSQLQNDRLFLYYLQNGRDMYTGEELDIDYLSQYDIDHIIPQAFIKDNSIDNRVLTSSKENRGKSDDVPSKDVVRKMKSYWSKLLSAKLITQRKFDNLTKAERGGLTDDDKAGFIKRQLVETRQITKHVARILDERFNTETDENNKKIRQVKIVTLKSNLVSNFRKEFELYKVREINDYHHAHDAYLNAVIGKALLGVYPQLEPEFVYGDYPHFHGHKENKATAKKFFYSNIMNFFKKDDVRTDKNGEIIWKKDEHISNIKKVLSYPQVNIVKKVEEQTGGFSKESILPKGNSDKLIPRKTKKFYWDTKKYGGFDSPIVAYSILVIADIEKGKSKKLKTVKALVGVTIMEKMTFERDPVAFLERKGYRNVQEENIIKLPKYSLFKLENGRKRLLASARELQKGNEIVLPNHLGTLLYHAKNIHKVDEPKHLDYVDKHKDEFKELLDVVSNFSKKYTLAEGNLEKIKELYAQNNGEDLKELASSFINLLTFTAIGAPATFKFFDKNIDRKRYTSTTEILNATLIHQSITGLYETRIDLNKLGGD

SEQ ID NO: 1206 - protein, 1350 aa, Streptococcus mutans
MKKPYSIGLDIGTNSVGWAVVTDDYKVPAKKMKVLGNTDKSHIEKNLLGALLFDSGNTAEDRRLKRTARRRYTRRRNRILYLQEIFSEEMGKVDDSFFHRLEDSFLVTEDKRGERHPIFGNLEEEVKYHENFPTIYHLRQYLADNPEKVDLRLVYLALAHIIKFRGHFLIEGKFDTRNNDVQRLFQEFLAVYDNTFENSSLQEQNVQVEEILTDKISKSAKKDRVLKLFPNEKSNGRFAEFLKLIVGNQADFKKHFELEEKAPLQFSKDTYEEELEVLLAQIGDNYAELFLSAKKLYDSILLSGILTVTDVSTKAPLSASMIQRYNEHQMDLTQLKQFIRQKLSDKYNEVFSDVSKDGYAGYIDGKTNQEAFYKYLKGLLNKIEGSGYFLDKIEREDFLRKQRTFDNGSIPHQIHLQEMRAIIRRQAEFYSFLADNQDRIEKILTFRIPYYVGPLARGKSDFAWLSRKSADKITPWNFDEIVDKESSAEAFINRMTNYDLYLPNQKVLPKHSLLYEKFTVYNELTKVKYKTEQGKTAFFDANMKQEIFDGVFKVYRKVTKDKLMDFLEKEFDEFRIVDLTGLDKENKAFNASYGTYHDLRKILDKDFLDNSKNEKILEDIVLTLTLFEDREMIRKRLENYSDLLTKEQVKKLERRHYTGWGRLSAELIHGIRNKESRKTILDYLIDDGNSNRNFMQLINDDALSFKEEIAKAQVIGETDNLNQVVSDIAGSPAIKKGILQSLKIVDELVKIMGHQPENIVVEMARENQFTNQGRRNSQQRLKGLTDSIKEFGSQILKEHPVENSQLQNDRLFLYYLQNGRDMYTGEELDIDYLSQYDIDHIIPQAFIKDNSIDNRVLTSSKENRGKSDDVPSEDVVNRMRPFWNKLLSSGLISQRKYNNLTKKELTLDDKAGFIKRQLVETRQITKHVARMLDERFNKEFDDNNKRIRKVKIVTLKSNLVSSFRKEFELYKVREINDYHHAHDAYLNAVVVKALLVKYSKLEPEFVYGEYPKYNSYRERKTATQKMFFYSNIMNMFKSKVKLADDQIVERPMIEVNDETGEIAWDKTKHITTVKKVLSYPQVNIVKKVEEQTIGQNGGLFDDNPKSPLEVIPSKLVPLKKALNPEKYGGYQKPTTAYPILLIVDTKQLIPISVMDKKRFEQNPVKFLKDKGYQQIEKNNFVKLPKYTLVDIGNGIKRLWASSKEVHKGNQLVVSKKSQDLLYHAHHLDNDYSNEYVKNHYQQFDILFNEITSFSKKCKLGKEHIQKIEEAYSKERDSASIEELADGFIKLLGFTQLGATSPFSFLGIKLNQKQYTGKKDYLLPCMEATLIHQSITGLYETRIDLSKLGGD

SEQ ID NO: 1207 - protein, 1350 aa, Streptococcus mutans
MKKPYSIGLDIGTNSVGWAVVTDDYKVPAKKMKVLGNTDKSHIEKNLLGALLFDSGNTAEDRRLKRTARRRYTRRRNRILYLQEIFSEEMGKVDDSFFHRLEDSFLVTEDKRGERHPIFGNLEEEVKYHENFPTIYHLRQYLADNPEKVDLRLVYLALAHIIKFRGHFLIEGKFDTRNNDVQRLFQEFLAVYDNTFENSSLQEQNVQVEEILTDKISKSAKKDRVLKLFPNEKSNGRFAEFLKLIVGNQADFKKHFELEEKAPLQFSKDTYEEELEVLLAQIGDNYAELFLSAKKLYDSILLSGILTVTDVSTKAPLSASMIQRYNEHQMDLTQLKQFIRQKLSDKYNEVFSDVSKDGYAGYIDGKTNQEAFYKYLKGLLNKIEGSGYFLDKIEREDFLRKQRTFDNGSIPHQIHLQEMRAIIRRQAEFYPFLADNQDRIEKILTFRIPYYVGPLARGKSDFAWLSRKSADKITPWNFDEIVDKESSAEAFINRMTNYDLYLPNQKVLPKHSLLYEKFTVYNELTKVKYKTEQGKTAFFDANMKQEIFDGVFKVYRKVTKDKLMDFLEKEFDEFRIVDLTGLDKENKAFNASYGTYHDLRKILDKDFLDNSKNEKILEDIVLTLTLFEDREMIRKRLKNYSDLLTKEQLKKLERRHYTGWGRLSAELIHGIRNKESRKTILDYLIDDGNSNRNFMQLINDDALSFKEEIAKAQVIGETDNLNQVVSDIAGSPAIKKGILQSLKIVDELVKIMGHQPENIVVEMARENQFTNQGRQNSQQRLKGLTDSIKEFGSQILKEHPVENSQLQNDRLFLYYLQNGRDMYTGEELDIDYLSQYDIDHIIPQAFIKDNSIDNRVLTSSKENRGKSDDVPSEDVVNRMRPFWNKLLSSGLISQRKYNNLTKKELTLDDKAGFIKRQLVETRQITKHVARMLDERFNKEFDDNNKRICKVKIVTLKSNLVSSFRKEFELYKVREINDYHHAHDAYLNAVVVKALLVKYSKLEPEFVYGEYPKYNSYRERKTATQKMFFYSNIMNMFKSKVKLADDQIVERPMIEVNDETGEIAWDKTKHITTVKKVLSYPQVNIVKKVEEQTIGQNGGLFDDNPKSPLEVIPSKLVPLKKALNPEKYGGYQKPTTAYPILLIVDTKQLIPISVMDKKRFEQNPVKFLKDKGYQQIEKNNFVKLPKYTLVDIGNGIKRLWASSKEVHKGNQLVVSKKSQDLLYHAHHLDNDYSNEYVKNHYQQFDILFNEITSFSKKCKLGKEHIQKIEEAYSKERDSASIEELADGFIKLLGFTQLGATSPFSFLGIKLNQKQYTGKKDYLLPCMEATLIHQSITGLYETRIDLSKLGGD

SEQ ID NO: 1208 - protein, 1345 aa, Streptococcus mutans; identical to SEQ ID NO: 1205

SEQ ID NO: 1209 - protein, 1350 aa, Streptococcus mutans; identical to SEQ ID NO: 1206

SEQ ID NO: 1210 - protein, 1350 aa, Streptococcus mutans; identical to SEQ ID NO: 1207

SEQ ID NO: 1211 - protein, 1345 aa, Streptococcus mutans
MKKPYSIGLDIGTNSVGWAVVTDDYKVPAKKMKVLGNTDKSHIKKNLLGALLFDSGNTAADRRLKRTARRRYTRRRNRILYLQEIFAEEMSKVDDSFFHRLEDSFLVTEDKRGERHPIFGNLEEEVKYHENFPTIYHLRQYLADNPEKVDLRLVYLALAHIIKFRGHFLIEGKFDTRNNDVQRLFQEFLAVYDNTFENSSLQEQNVQVEEILTDKISKSAKKDRVLKLFPNEKSNGRFAEFLKLIVGNQADFKKHFELEEKAPLQFSKDTYEEELEVLLTQIGDNYAELFLSAKKLYDSILLSGILTVTDVSTKAPLSASMIQRYNEHQMDLAQLKQFIRQKLSDKYNEVFSDVSKDGYAGYIDGKTNQEAFYKYLKGLLNKIEGSGYFLDKIEREDFLRKQRTFDNGSIPHQIHLQEMRAIIRRQAEFYPFLADNQDRIEKILTFRIPYYVGPLARGKSDFAWLSRKSADKITPWNFDEIVDKESSAEAFINRMTNYDLYLPNQKVLPKHSLLYEKFTVYNELTKVKYKTEQGKTAFFDANMKQEIFDGVFKVYRKVTKDKLMDFLEKEFDEFRIVDLTGLDKENKAFNASYGTYHDLRKILDKDFLDNSKNEKILEDIVLTLTLFEDREMIRKRLENYSDLLTKEQVKKLERRHYTGWGRLSAELIHGIRNKESRKTLLDYLIDDGNSNRNFMQLINDDALSFKEEIAKAQVIGETDNLNQVVSDIAGSPAIKKGILQSLKIVDELVKIMGHQPENIVVEMARENQFTNQGRRNSQQRLKGLTDSIKEFGSQILKEHPVENSQLQNDRLFLYYLQNGRDMYTGEELDIDYLSQYDIDHIIPQAFIKDNSIDNRVLTSSKENRGKSDDVPSKDVVRKMKPYWSKLLSAKLITQRKFDNLTKAERGGLTDDDKAGFIKRQLVETRQITKHVARILDERFNTETDENNKKIRQVKIVTLKSNLVSNFRKEFELYKVREINDYHHAHDAYLNAVIGKALLGVYPQLEPEFVYGDYPHFHGHEENKATAKKFFYSNIMNFFKKDDVRTDKNGEIIWKKDEHISNIKKVLSYPQVNIVKKVEEQTGGFSKESILPKGNSDKLIPRKTKKFYWDTKKYGGFDSPIVAYSILVIADIEKGKSKKLKTVKALVGVTIMEKMTFERDPVAFLERKGYRNVQEENIIKLPKYSLFKLENGRKRLLASARELQKGNEIVLPNHLGTLLYHAKNIHKVDEPKHLDYVDKHKDEFKELLDVVSNFSKKYTLAEGNLEKIKELYAQNNGEDLKELSSSFINLLTFTAIGAPAAFKFFDKNIDRKRYTSTTEILNATLIHQSITGLYETRIDLSKLGGD

SEQ ID NO: 1212 - protein, 1345 aa, Streptococcus mutans
MKKPYSIGLDIGTNSVGWAVVTDDYKVPAKKMKVLGNTDKSHIKKNLLGALLFDSGNTAADRRLKRTARRRYTRRRNRILYLQEIFAEEMSKVDDSFFHRLEDSFLVTEDKRGERHPIFGNLEEEVKYHENFPTIYHLRQYLADNPEKVDLRLVYLALAHIIKFRGHFLIEGKFDTRNNDVQRLFQEFLAVYDNTFENSSLQEQNVQVEEILTDKISKSAKKDRVLKLFPNEKSNGRFAEFLKLIVGNQADFKKHFELEEKAPLQFSKDTYEEELEVLLAQIGDNYAELFLSAKKLYDSILLSGILTVTDVSTKAPLSASMIQRYNEHQMDLAQLKQFIRQKLSDKYNEVFSDVSKDGYAGYIDGKTNQEAFYKYLKGLLNKIEGSGYFLDKIEREDFLRKQRTFDNGSIPHQIHLQEMRAIIRRQAEFYPFLADNQDRIEKILTFRIPYYVGPLARGKSDFAWLSRKSADKITPWNFDEIVDKESSAEAFINRMTNYDLYLPNQKVLPKHSLLYEKFTVYNELTKVKYKTEQGKTAFFDANMKQEIFDGVFKVYRKVTKDKLMDFLEKEFDEFRIVDLTGLDKENKAFNASYGTYHDLRKILDKDFLDNSKNEKILEDIVLTLTLFEDREMIRKRLENYSDLLTKEQVKKLERRHYTGWGRLSAELIHGIRNKESRKTILDYLIDDGNSNRNFMQLINDDALSFKEEIAKAQVIGETDNLNQVVSDIAGSPAIKKGILQSLKIVDELVKIMGHQPENIVVEMARENQFTNQGRRNSQQRLKGLTDSIKEFGSQILKEHPVEHSQLQNDRLFLYYLQNGRDMYTGEELDIDYLSQYDIDHIIPQAFIKDNSIDNRVLTSSKENRGKSDDVPSKNVVRKMKSYWSKLLSAKLITQRKFDNLTKAERGGLTDDDKAGFIKRQLVETRQITKHVARILDERFHTETDENNKKIRQVKIVTLKSNLVSNFRKEFELYKVREINDYHHAHDAYLNAVIGKALLGVYPQLEPEFVYGDYPHFHGHKENKATAKKFFYSNIMNFFKKDDVRTDKNGEIIWKKDEHISNIKKVLSYPQVNIVKKVEEQTGGFSKESILPKGNSDKLIPRKTKKFYWDTKKYGGFDSPIVAYSILVIADIEKGKSKKLKTVKALVGVTIMEKMTFERDPVAFLERKGYRNVQEENIIKLPKYSLFKLENGRKRLLASARELQKGNEIVLPNHLGTLLYHAKNIHKVDEPKHLDYVDKHKDEFKELLDVVSNFSKKYTLAEGNLEKIKELYAQNNGEDLKELASSFINLLTFTAIGAPATFKFFDKNIDRKRYTSTTEILNATLIHQSITGLYETRIDLSKLGGD

SEQ ID NO: 1213 - protein, 1345 aa, Streptococcus mutans
MKKPYSIGLDIGTNSVGWAVVTDDYKVPAKKMKVLGNTDKSHIKKNLLGALLFDSGNTAADRRLKRTARRRYTRRRNRILYLQEIFAEEMSKVDDSFFHRLEDSFLVTEDKRGERHPIFGNLEEEVKYHENFPTIYHLRQYLADNPEKVDLRLVYLALAHIIKFRGHFLIEGKFDTRNNDVQRLFQEFLAVYDNTFENSSLQEQNVQVEEILTDKISKSAKKDRVLKLFPNEKSNGRFAEFLKLIVGNQADFKKHFELEEKAPLQFSKDTYEEELEVLLAQIGDNYAELFLSAKKLYDSILLSGILTVTDVSTKAPLSASMIQRYNEHQMDLAQLKQFIRQKLSDKYNEVFSDVSKDGYAGYIDGKTNQEAFYKYLKGLLNKIEGSGYFLDKIEREDFLRKQRTFDNGSIPHQIHLQEMRAIIRRQAEFYPFLADNQDRIEKILTFRIPYYVGPLARGKSDFAWLSRKSADKITPWNFDEIVDKESSAEAFINRMTNYDLYLPNQKVLPKHSLLYEKFTVYNELTKVKYKTEQGKTAFFDANMKQEIFDGVFKVYRKVTKDKLMDFLEKEFDEFRIVDLTGLDKENKVFNASYGTYHDLCKILDKDFLDNSKNEKILEDIVLTLTLFEDREMIRKRLENYSDLLTKEQVKKLERRHYTGWGRLSAELIHGIRNKESRKTILDYLIDDGNSNRNFMQLINDDALSFKEEIAKAQVIGETDNLNQVVSDIAGSPAIKKGILQSLKIVDELVKIMGHQPENIVVEMARENQFTKQGRRNSQQRLKGLTDSIKEFGSQILKEHPVENSQLQNDRLFLYYLQNGRDMYTGEELDIDYLSQYDIDHIIPQAFIKDNSIDNRVLTSSKENRGKSDDVPSKDVVRKMKSYWSKLLSAKLITQRKFDNLTKAERGGLTDDDKAGFIKRQLVETRQITKHVARILDERFYTETDENNKKIRQVKIVTLKSNLVSNFRKEFELYKVREINDYHHAHDAYLNAVIGKALLGVYPQLEPEFVYGDYPHFHGHKENKATAKKFFYSNIMNFFKKDDVRTDKNGEIIWKKDEHISNIKKVLSYPQVNIVKKVEEQTGGFSKESILPKGNSDKLIPRKTKKFYWDTKKYGGFDSPIVAYSILVIADIEKGKSKKLKTVKALVGVTIMEKMTFERDPVAFLERKGYRNVQEENIIKLPKYSLFKLENGRKRLLASARELQKGNEIVLPNHLGTLLYHAKNIHKVDEPKHLDYVDKHKDEFKELLDVVSNFSKKYTLAEGNLEKIKELYAQNNGEDLKELASSFINLLTFTAIGAPATFKFFDKNIDRKRYTSTTEILNATLIHQSITGLYETRIDLSKLGGD

SEQ ID NO: 1214 - protein, 1345 aa, Streptococcus mutans
MKKPYSIGLDIGTNSVGWAVVTDDYKVPAKKMKVLGNTDKSHIKKNLLGALLFDSGNTAADRRLKRTARRRYTRRRNRILYLQEIFAEEMSKVDDSFFHRLEDSFLVTEDKRGERHPIFGNLEEEVKYHENFPTIYHLRQYLADNPEKVDLRLVYLALAHIIKFRGHFLIEGKFDTRNNDVQRLFQEFLAVYDNTFENSSLQEQNVQVEEILTDKISKSAKKDRVLKLFPNEKSNGRFAEFLKLIVGNQADFKKHFELEEKAPLQFSKDTYEEELEVLLAQIGDNYAELFLSAKKLYDSILLSGILTVTDVSTKAPLSASMIQRYNEHQMDLAQLKQFIRQKLSDKYNEVFSDVSKDGYAGYIDGKTNQEAFYKYLKGLLNKIEGSGYFLDKIEREDFLRKQRTFDNGSIPHQIHLQEMRAIIRRQAEFYPFLADNQDRIEKILTFRIPYYVGPLARGKSDFAWLSRKSADKITPWNFDEIVDKESSAEAFINRMTNYDLYLPNQKVLPKHSLLYEKFTVYNELTKVKYKTEQGKTAFFDANMKQEIFDGVFKVYRKVTKDKLMDFLEKEFDEFRIVDLTGLDKENKAFNASYGTYHDLRKILDKDFLDNSKNEKILEDIVLTLTLFEDREMIRKRLENYSDLLTKEQVKKLERRHYTGWGRLSAELIHGIRNKESRKTILDYLIDDGNSNRNFMQLINDDALSFKEEIAKAQVIGETDNLNQVVSDIAGSPAIKKGILQSLKIVDELVKIMGHQPENIVVEMARENQFTNQGRRNSQQRLKGLTDSIKEFGSQILKEHPVENSQLQNDRLFLYYLQNGRDMYTGEELDIDYLSQYDIDHIIPQAFIKDNSIDNRVLTSSKENRGKSDDVPSKNVVRKMKSYWSKLLSAKLITQRKFDNLTKAERGGLTDDDKAGFIKRQLVETRQITKHVARILDERFHTETDENNKKIRQVKIVTLKSNLVSNFRKEFELYKVREINDYHHAHDAYLNAVIGKALLGVYPQLEPEFVYGDYPHFHGHKENKATAKKFFYSNIMNFFKKDDVRTDKNGEIIWKKDEHISNIKKVLSYPQVNIVKKVEEQTGGFSKESILPKGNSDKLIPRKTKKFYWDTKKYGGFDSPIVAYSILVIADIEKGKSKKLKTVKALVGVTIMEKMTFERDPVAFLERKGYRNVQEENIIKLPKYSLFKLENGRKRLLASARELQKGNEIVLPNHLGTLLYHAKNIHKVDEPKHLDYVDKHKDEFKELLDVVSNFSKKYTLAEGNLEKIKELYAQNNGEDLKELSSSFINLLTFTAIGAPAAFKFFDKNIDRKRYTSTTEILNATLIHQSITGLYETRIDLSKLGGD

SEQ ID NO: 1215 - protein, 1345 aa, Streptococcus mutans; identical to SEQ ID NO: 1211

SEQ ID NO: 1216 - protein, 1345 aa, Streptococcus mutans; identical to SEQ ID NO: 1212

SEQ ID NO: 1217 - protein, 1345 aa, Streptococcus mutans; identical to SEQ ID NO: 1213

SEQ ID NO: 1218 - protein, 1345 aa, Streptococcus mutans; identical to SEQ ID NO: 1214

SEQ ID NO: 1219 - protein, 1345 aa, Streptococcus mutans; identical to SEQ ID NO: 1212

SEQ ID NO: 1220 - protein, 1345 aa, Streptococcus mutans; identical to SEQ ID NO: 1212

SEQ ID NO: 1221 - protein, 1345 aa, Streptococcus mutans; identical to SEQ ID NO: 1212

SEQ ID NO: 1222 - protein, 1345 aa, Streptococcus mutans; identical to SEQ ID NO: 1212

SEQ ID NO: 1223 - protein, 1359 aa, Streptococcus mutans
MKKPYSIGLDIGTNSVGWAVVTDDYKVPAKKMKVLGNTDKSHIKKNLLGALLFDSGNTAEDRRLKRTARRRYTRRRNRILYLQEIFAEEMMQVDESFFQRLDDSFLVEEDKRGSRYPIFGTLKEEKKYHKEFKTIYHLREKLANSTEKADLRLVYLSLAHMIKFRGHFLIEGQLKAENTNVQALFKDFVEVYDKTVEESHLSEMTVDALSILTEKVSKSRRLENLVECYPTEKKNTLFGNLIALSLGLQPNFKTNFQLSEDAKLQFSKDTYEEDLEGLLGEIGDEYADLFASAKNLYDAILLSGILAVDDNTTKAPLSASMVKRYKEHKEELAAFKRFIKEKLPKKYEEIFKDDTKNGYAGYVGADKKLRKRSGKLATEEEFYKYVKGILNKVEGADVWLDKIDREDFLRKQRTFDNGSIPHQIHLQEMHAILRRQGEHYPFLKENQDKIEKILTFRIPYYVGPLVRKGSRFAWAEYKADEKITPWNFDDILDKEKSAEKFITRMTLNDLYLPEEKVLPKHSLLYETFTVYNELTKVKYVNEQGEAKFFDANMKQEIFDHVFKENRKVTKDKLLNYLNKEFEEFRIVNLTGLDKENKVFNSSLGTYHDLRKILNKSFLDNKENEQIIEDIIQTLTLFEDREMIRQRLQKYSDIFTKAQLKKLERRHYTGWGRLSYKLINGIRDKQSNKTILGYLIDDGYSNRNFMQLINDDALSFKEEIAKAQVIGEMDGLNQVVSDIAGSPAIKKGILQSLKIVDELVKVMGHNPANIVIEMARENQTTAKGRRSSQKRYKRLEEAIKNLDHDLNHKILKEHPTDNQALQNDRLFLYYLQNGRDMYTEDPLDINRLSDYDIDHIIPQAFIKDNSIDNRVLTRSDKNRGKSDDVPSEEVVHKMKPFWSKLLSAKLITQRKFDNLTKAERGGLTDDDKAGFIKRQLVETRQITKHVARILDERFNTETDENNKKIRQVKIVTLKSNLVSNFRKEFELYKVREINDYHHAHDAYLNAVIGKALLGVYPQLEPEFVYGDYPHFHGHKENKATAKKFFYSNIMNFFKKGDVRTDKNGEIIWKKDEHISNIKKVLSYPQVNIVKKVEEQTGGFSKESILPKGNSDKLIPRKTKKFYWDTKKYGGFDSPIVAYSILVIADIEKGKSKKLKTVKALVGVTIMEKMTFERDPVAFLERKGYRNVQEENIIKLPKYSLFKLENGRKRLLASARELQKGNEIVLPNHLETLLYHAKNIHKVDEPKHLDYVDKHKDEFKELLDVVSNFSKKYTLAEGNLEKIKELYAQNNGEDLKELASSFINLLTFTAIGAPAAFKFFDKNIDRKRYTSTTEILNATLIHQSITGLYETRIDLNKLGGD

SEQ ID NO: 1224 - protein, 1359 aa, Streptococcus mutans; identical to SEQ ID NO: 1223

SEQ ID NO: 1225 - protein, 1355 aa, Streptococcus mutans
MKKPYSIGLDIGTNSVGWAVVTDDYKVPAKKMKVLGNTDKSHIKKNLLGALLFDSGNTAEDRRLKRTARRRYTRRRNRILYLQEIFAEEMSKVDDSFFHRLDESFLTDDDKNFDSHPIFGNKAEEDAYHQKFPTIYHLRKHLADSTEKADLRLVYLALAHMIKFRGHFLIEGELNAENTDVQKLFADFVGVYDRTFDDSHLSEITVDASSILTEKISKSRRLEKLINNYPKEKKNTLFGNLIALSLGLQPNFKTNFKLSEDAKLQFSKDTYEEDLEELLGKIGDDYADLFTLAKNLYDAILLSGILTADDSSTKAPLSASMIKRYAEHHEDLEKLKEFIKANKPELYHDIFKDETKNGYAGYIENGVKQDEFYKYLKNTLSKITGSDYFLDQIEREDFLRKQRTFDNGSIPHQIHLQEMHAILRRQGDYYPFLKENQDRIEKILTFRIPYYVGPLARKNSRFAWAEYHSDEAVTPWNFDQVIDKESSAQAFIEHMTNNDLYLPNEKVLPKHSPLYEKYTVYNELTKIKYVTEIGEAKFFDANLKQEIFDGLFKHERKVTKKKLRTFLDKNFDEFRIVDIQGLDKETETFNASYATYQDLLKVIKDKVFMDNPENAEILENIVLTLTLFEDREMIKQRLAKYADVFDKKVIDQLARRHYTGWGRLSAKLLNGIRDKQSCKTIMDYLIDDAQSNRNLMQLITDDNLTFKDDIVKAQYVDNSDDLHQVVQSLAGSPAIKKGILQSLKIVDELVKVMGKEPEQIVVEMARENQTTAKGRRNSQQRYKRLKEAIKSLDRDLNHKILKEHPTDNQALQNNRLFLYYLQNGRDMYTGESLDINRLSDYDIDHVIPQAFIKDNSIDNRVLTSSKANRGKSDDVPSEDVVNRMRPFWNKLLSSGLISQRKYNNLTKKELTLDDKAGFIKRQLVETRQITKHVARMLDERFNKEFDDNNKRIRRVKIVTLKSNLVSSFRKEFELYKVREINDYHHAHDAYLNAVVVKALLVKYPKLEPEFVYGEYPKYNSYRERKTATQKMFFYSNIMNMFKSKVKLADDQIVERPMIEVNDETGEIAWDKTKHITTVKKVLSYPQVNIVKKVEEQTIGQNGGLFDDNPKSPLEVIPSKLVPLKKALNPEKYGGYQKPTTAYPILLIVDTKQLIPISVMDKKRFEQNPVKFLKDKGYQQIEKNNFVKLPKYTLVDIGNGIKRLWASSKEVHKGNQLVVSKKSQDLLYHAHHLDNDYSNEYVKNHYQQFDILFNEITSFSKKCKLGKEHIQKIEEAYSKERDFASIEELADGFIKLLGFTQLGATSPFSFLGIKLNQKQYTGKKDYLLPCMEATLIHQSITGLYETRIDLSKLGGD

SEQ ID NO: 1226 - protein, 1355 aa, Streptococcus mutans; identical to SEQ ID NO: 1225

SEQ ID NO: 1227 - protein, 1345 aa, Streptococcus mutans
MKKPYSIGLDIGTNSVGWAVVTDDYKVPAKKMKVLGNTDKSHIKKNLLGALLFDSGNTAEDRRLKRTARRRYTRRRNRILYLQEIFSEEMDKVDDSFFHRLEDSFLVTEDKRGERHPIFGNLEEEVKYHENFPTIYHLRQYLADNPEKVDLRLVYLALAHIIKFRGHFLIEGKFDTRNNDVQRLFQEFLAVYDNTFENSSLQEQNVQVEEILTDKISKSAKKDRVLKLFPNEKSNGRFAEFLKLIVGNQADFKKHFELEEKAPLQFSKDTYEEELEVLLAQIGDNYAELFLSAKKLYDSILLSGILTVTDVSTKAPLSASMIQRYNEHQMDLAQLKQFIRQKLSDKYNEVFSDVSKDGYAGYIDGKTNQEAFYKYLKGLLNKIEGSGYFLDKIEREDFLRKQRTFDNGSIPHQIHLQEMRAIIRRQAEFYPFLADNQDRIEKILTFRIPYYVGPLARGKSDFAWLSRKSADKITPWNFDEIVDKESSAEAFINRMTNYDLYLPNQKVLPKHSLLYEKFTVYNELTKVKYKTEQGKTAFFDANMKQEIFDGVFKVYRKVTKDKLMDFLEKEFDEFRIVDLTGLDKENKVFNASYGTYHDLCKILDKDFLDNSKNEKILEDIVLTLTLFEDREMIRKRLENYSDLLTKEQVKKLERRHYTGWGRLSAELIHGIRNKESRKTILDYLIDDGNSNRNFMQLINDDALSFKEEIAKAQVIGETDNLNQVVSDIAGSPAIKKGILQSLKIVDELVKIMGHQPENIVVEMARENQFTKQGRRNSQQRLKGLTDSIKEFGSQILKEHPVENSQLQNDRLFLYYLQNGRDMYTGEELDIDYLSQYDIDHIIPQAFIKDNSIDNRVLTSSKENRGKSDDVPSKDVVRKMKSYWSKLLSAKLITQRKFDNLTKAERGGLTDDDKAGFIKRQLVETRQITKHVARILDERFYTETDENNKKIRQVKIVTLKSNLVSNFRKEFELYKVREINDYHHAHDAYLNAVIGKALLGVYPQLEPEFVYGDYPHFHGHKENKATAKKFFYSNIMNFFKKDDVRTDKNGEIIWKKDEHISNIKKVLSYPQVNIVKKVEEQTGGFSKESILPKGNSDKLIPRKTKKFYWDTKKYGGFDSPIVAYSILVIADIEKGKSKKLKTVKALVGVTIMEKMTFERDPVAFLERKGYRNVQEENIIKLPKYSLFKLENGRKRLLASARELQKGNEIVLPNHLGTLLYHAKNIHKVDEPKHLDYVDKHKDEFKELLDVVSNFSKKYTLAEGNLEKIKELYAQNNGEDLKELASSFINLLTFTAIGAPATFKFFDKNIDRKRYTSTTEILNATLIHQSITGLYETRIDLSKLGGD

SEQ ID NO: 1228 - protein, 1345 aa, Streptococcus mutans; identical to SEQ ID NO: 1227

SEQ ID NO: 1229 - protein, 1345 aa, Streptococcus mutans
MKKPYSIGLDIGTNSVGWAVVTDDYKVPAKKMKVLGNTDKSHIKKNLLGALLFDSGNTAEDRRLKRTARRRYTRRRNRILYLQEIFSEEMGKVDDSFFHRLDESFLTDDDKNFDSHPIFGNKAEEDAYHQKFPTIYHLRKHLADSTEKADLRLVYLALAHMIKFRGHFLIEGELNAENTDVQKLFADFVGVYDRTFDDSHLSEITVDASSILTEKISKSRRLEKLINNYPKEKKNTLFGNLIALSLGLQPNFKTNFKLSEDAKLQFSKDTYEEELEVLLAQIGDNYAELFLSAKKLYDSILLSGILTVTDVSTKAPLSASMIQRYNEHQMDLAQLKQFIRQKLSDKYNEVFSDVSKDGYAGYIDGKTNQEAFYKYLKGLLNKIEGSGYFLDKIEREDFLRKQRTFDNGSIPHQIHLQEMRAIIRRQAEFYPFLADNQDRIEKILTFRIPYYVGPLARGKSDFAWLSRKSADKITPWNFDEIVDKESSVEAFINRMTNYDLYLPNQKVLPKHSLLYEKFTVYNELTKVKYKTEQGKTAFFDANMKQEIFDGVFKVYRKVTKDKLMDFLEKEFDEFRIVDLTGLDKENKAFNASYGTYHDLRKILDKDFLDNSKNEKILEDIVLTLTLFEDREMIRKRLKNYSDLLTKEQLKKLERRHYTGWGRLSAELIHGIRNKESRKTILDYLIDDGNSNRNFMQLINDDALSFKEEIAKAQVIGETDNLNQVVSDIAGSPAIKKGILQSLKIVDELVKIMGHQPENIVVEMARENQFTNQGRRNSQQRLKGLTDSIKEFGSQILKEHPVENSQLQNDRLFLYYLQNGRDMYTGEELDIDYLSQYDIDHIIPQAFIKDNSIDNRVLTSSKENRGKSDDVPSKDVVRKMKSYWSKLLSAKLITQRKFDNLTKGERGGLTDDDKAGFIKRQLVETRQITKHVARILDERFNTETDENNKKIRQVKIVTLKSNLVSNFRKEFELYKVREINDYHHAHDAYLNAVIGKALLGVYPQLEPEFVYGDYPHFHGHKENKATAKKFFYSNIMNFFKKDDVRTDKNGEIIWKKDEYISNIKKVLSYPQVNIVKKVEEQTGGFSKESILPKGDSDKLIPRKTKKFYWDTKKYGGFDSPIVAYSILVIADIEKGKSKKLKTVKALVGVTIMEKMTFERDPVAFLERKGYRNVQEENIIKLPKYSLFKLENGRKRLLASARELQKGNEIVLPNHLGTLLYHAKNIHKVDEPKHLDYVDKHKDEFKELLDVVSNFSKKYTLAEGNLEKIKELYAQNNGEDLKELASSFINLLTFTAIGAPATFKFFDKNIDRKRYTSTTEILNATLIHQSITGLYETRIDLSKLGGD

SEQ ID NO: 1230 - protein, 1345 aa, Streptococcus mutans
MKKPYSIGLDIGTNSVGWAVVTDDYKVPAKKMKVLGNTDKSHIKKNLLGALLFDSGNTAEDRRLKRTARRRYTRRRNRILYLQEIFSEEMGKVDDSFFHRLDESFLTDDDKNFDSYPIFGNKAEEDAYHQKFPTIYHLRKHLADSTEKADLRLVYLALAHMIKFRGHFLIEGELNAENTDVQKLFADFVGVYDRTFDDSHLSEITVDASSILTEKISKSRRLEKLINNYPKEKKNTLFRNLVALSLGLQPNFKTNFKLSEDAKLQFSKDTYEEDLEELLGKIGDDYADLFTLAKNLYDAILLSGILTADDSSTKAPLSASMIKRYAEHHEDLEKLKEFIKANKPELYHDIFKDETKNGYAGYIENGVKQDEFYKYLKNTLSKIAGSDYFLDKIEREDFLRKQRTFDNGSIPHQIHLQEMHAILRRQGDYYPFLKENQDRIEKILTFRIPYYVGPLARGKSDFAWLSRKSADKITPWNFDEIVDKESSVEAFINRMTNYDLYLPNQKVLPKHSLLYEKFTVYNELTKVKYKTEQGKTAFFDANMKQEIFDGVFKVYRKVTKDKLMDFLEKEFDEFRIVDLTGLDKENKAFNASYGTYHDLRKILDKDFLDNSKNEKILEDIVLTLTLFEDREMIRKRLKNYSDLLTKEQLKKLERRHYTGWGRLSAELIHGIRNKESRKTILDYLIDDGNSNRNFMQLINDDALSFKEEIAKAQVIGETDNLNQVVSDIAGSPAIKKGILQSLKIVDELVKIMGHQPENIVVEMARENQFTNQGRRNSQQRLKGLTDSIKEFGSQILKEHPVENSQLQNDRLFLYYLQNGRDMYTGEELDIDYLSQYDIDHIIPQAFIKDNSIDNRVLTSSKENRGKSDDVPSKDVVRKMKSYWSKLLSAKLITQRKFDNLTKGERGGLTDDDKAGFIKRQLVETRQITKHVARILDERFNTETDENNKKIRQVKIVTLKSNLVSNFRKEFELYKVREINDYHHAHDAYLNAVIGKALLGVYPQLEPEFVYGDYPHFHGHKENKATAKKFFYSNIMNFFKKDDVRTDKNGEIIWKKDEYISNIKKVLSYPQVNIVKKVEEQTGGFSKESILPKGDSDKLIPRKTKKFYWDTKKYGGFDSPIVAYSILVIADIEKGKSKKLKTVKALVGVTIMEKMTFERDPVAFLERKGYRNVQEENIIKLPKYSLFKLENGRKRLLASARELQKGNEIVLPNHLGTLLYHAKNIHKVDEPKHLDYVDKHKDEFKELLDVVSNFSKKYTLAEGNLEKIKELYAQNNGEDLKELASSFINLLTFTAIGAPATFKFFDKNIDRKRYTSTTEILNATLIHQSITGLYETRIDLSKLGGD

SEQ ID NO: 1231 - protein, 1345 aa, Streptococcus mutans; identical to SEQ ID NO: 1230

SEQ ID NO: 1232 - protein, 1345 aa, Streptococcus mutans
MKKPYSIGLDIGTNSVGWAVVTDDYKVPAKKMKVLGNTDKSHIKKNLLGALLFDSGNTAEDRRLKRTARRRYTRRRNRILYLQEIFSEEMGKVDDSFFHRLEDSFLVTEDKRGERHPIFGNLEEEVKYHENFPTIYHLRQYLADNPEKTDLRLVYLALAHIIKFGGHFLIEGKFDTRNNDVQRLFQEFLAVYDNTFENSSLQEQNVQVEEILTDKISKSAKKDRVLKLFPNEKSNGRFAEFLKLIVGNQADFKKHFELEEKAPLQFSKDIYEEELEVLLAQIGDNYAELFLSAKKLYDSILLSGILTVTDVSTKAPLSASMIQRYNEHQMDLAQLKQFIRQKLSDKYNEVFSDVSKDGYAGYIDGKTNQEAFYKYLKGLLNKIEGSGYFLDKIEREDFLRKQRTFDNGSIPHQIHLQEMRAIIRRQAEFYPFLADNQDRIEKILTFRIPYYVGPLARGKSDFAWLSRKSADKITPWNFDEIVDKESSVEAFINRMTNYDLYLPNQKVLPKHSLLYEKFTVYNELTKVKYKTEQGKTAFFDANMKQEIFDGVFKVYRKVTKDKLMDFLEKEFDEFRIVDLTGLDKENKAFNASYGTYHDLRKILDKDFLDNSKNEKILEDIVLTLTLFEDREMIRKRLKNYSDLLTKEQLKKLERRHYTGWGRLSAELIHGIRNKESRKTILDYLIDDGNSNRNFMQLINDDALSFKEEIAKAQVIGETDNLNQVVSDIAGSPAIKKGILQSLKIVDELVKIMGHQPENIVVEMARENQFTNQGRRNSQQRLKGLTDSIKEFGSQILKEHPVENSQLQNDRLFLYYLQNGRDMYTGEELDIDYLSQYDIDHIIPQAFIKDNSIDNRVLTSSKENRGKSDDVPSKNVVRKMKSYWSKLLSAKLITQRKFDNLTKAERGGLTDDDKAGFIKRQLVETRQITKHVARILDERFHTETDENNKKIRQVKIVTLKSNLVSNFRKEFELYKVREINDYHHAHDAYLNAVIGKALLGVYPQLEPEFVYGDYPHFHGHKENKATAKKFFYSNIMNFFKKDDVRTDKNGEIIWKKDEHISNIKKVLSYPQVNIVKKVEEQTGGFSKESILPKGNSDKLIPRKTKKFYWDTKKYGGFDSPIVAYSILVIADIEKGKSKKLKTVKALVGVTIMEKMTFERDPVAFLERKGYRNVQEENIIKLPKYSLFKLENGRKRLLASARELQKGNEIVLPNHLGTLLYHAKNIHKVDEPKHLDYVDKHKDEFKELLDVVSNFSKKYTLAEGNLEKIKELYAQNNGEDLKELASSFINLLTFTAIGAPATFKFFDKNIDRKRYTSTTEILNATLIHQSITGLYETRIDLSKLGGD

SEQ ID NO: 1233 - protein, 1345 aa, Streptococcus mutans; identical to SEQ ID NO: 1232

SEQ ID NO: 1234 - protein, 1345 aa, Streptococcus mutans
MKKPYSIGLDIGTNSVGWAVVTDDYKVPAKKMKVLGNTDKSHIKKNLLGALLFDSGNTAEDRRLKRTARRRYTRRRNRILYLQEIFSEEMGKVDDSFFHRLEDSFLVTEDKRGERHPIFGNLEEEVKYHENFPTIYHLRQYLADNPEKTDLRLVYLALAHIIKFRGHFLIEGKFDTRNNDVQRLFQEFLAVYDNTFENSSLQEQNVQVEEILTDKISKSAKKDRVLKLFPNEKSNGRFAEFLKLIVGNQADFKKHFELEEKAPLQFSKDIYEEELEVLLAQIGDNYAELFLSAKKLYDSILLSGILTVTDVSTKAPLSASMIQRYNEHQMDLAQLKQFIRQKLSDKYNEVFSDVSKDGYAGYIDGKTNQEAFYKYLKGLLNKIEGSGYFLDKIEREDFLRKQRTFDNGSIPHQIHLQEMRAIIRRQAEFYPFLADNQDRIEKILTFRIPYYVGPLARGKSDFAWLSRKSADKITPWNFDEIVDKESSVEAFINRMTNYDLYLPNQKVLPKHSLLYEKFTVYNELTKVKYKTEQGKTAFFDANMKQEIFDGVFKVYRKVTKDKLMDFLEKEFDEFRIVDLTGLDKENKAFNASYGTYHDLRKILDKDFLDNSKNEKILEDIVLTLTLFEDREMIRKRLKNYSDLLTKEQLKKLERRHYTGWGRLSAELIHGIRNKESRKTILDYLIDDGNSNRNFMQLINDDALSFKEEIAKAQVIGETDNLNQVVSDIAGSPAIKKGILQSLKIVDELVKIMGHQPENIVVEMARENQFTNQGRRNSQQRLKGLTDSIKEFGSQILKEHPVENSQLQNDRLFLYYLQNGRDMYTGEELDIDYLSQYDIDHIIPQAFIKDNSIDNRVLTSSKENRGKSDDVPSKNVVRKMKSYWSKLLSAKLITQRKFDNLTKAERGGLTDDDKAGFIKRQLVETRQITKHVARILDERFHTETDENNKKIRQVKIVTLKSNLVSNFRKEFELYKVREINDYHHAHDAYLNAVIGKALLGVYPQLEPEFVYGDYPHFHGHKENKATAKKFFYSNIMNFFKKDDVRTDKNGEIIWKKDEHISNIKKVLSYPQVNIVKKVEEQTGGFSKESILPKGNSDKLIPRKTKKFYWDTKKYGGFDSPIVAYSILVIADIEKGKSKKLKTVKALVGVTIMEKMTFERDPVAFLERKGYRNVQEENIIKLPKYSLFKLENGRKRLLASARELQKGNEIVLPNHLGTLLYHAKNIHKVDEPKHLDYVDKHKDEFKELLDVVSNFSKKYTLAEGNLEKIKELYAQNNGEDLKELASSFINLLTFTAIGAPATFKFFDKNIDRKRYTSTTEILNATLIHQSITGLYETRIDLSKLGGD

SEQ ID NO: 1235 - protein, 1345 aa, Streptococcus mutans
MKKPYSIGLDIGTNSVGWAVVTDDYKVPAKKMKVLGNTDKSHIKKNLLGALLFDSGNTAEDRRLKRTARRRYTRRRNRILYLQEIFSEEMGKVDDSFFHRLEDSFLVTEDKRGERHPIFGNLEEEVKYHENFPTIYHLRQYLADNPEKTDLRLVYLALAHIIKFRGHFLIEGKFDTRNNDVQRLFQEFLAVYDNTFENSSLQEQNVQVEEILTDKISKSAKKDRVLKLFPNEKSNGRFAEFLKLIVGNQADFKKHFELEEKAPLQFSKDIYEEELEVLLAQIGDNYAELFLSAKKLYDSILLSGILTVTDVSTKAPLSASMIQRYNEHQMDLAQLKQFIRQKLSDKYNEVFSDVSKDGYAGYIDGKTNQEAFYKYLKGLLNKIEGSGYFLDKIEREDFLRKQRTFDNGSIPHQIHLQEMRAIIRRQAEFYPFLADNQDRIEKILTFRIPYYVGPLARGKSDFAWLSRKSADKITPWNFDEIVDKESSVEAFINRMTNYDLYLPNQKVLPKHSLLYEKFTVYNELTKVKYKTEQGKTAFFDANMKQEIFDGVFKVYRKVTKDKLMDFLEKEFDEFRIVDLTGLDKENKAFNASYGTYHDLRKILDKDFLDNSKNEKILEDIVLTLTLFEDREMIRKRLKNYSDLLTKEQLKKLERRHYTGWGRLSAELIHGIRNKESRKTILDYLIDDGNSNRNFMQLINDDALSFKEEIAKAQVIGETDNLNQVVSDIAGSPAIKKGILQSLKIVDELVKIMGHQPENIVVEMARENQFTNQGRRNSQQRLKGLTDSIKEFGSQILKEHPVENSQLQNDRLFLYYLQNGRDMYTGEELDIDYLSQYDIDHIIPQAFIKDNSIDNRVLTSSKENRGKSDDVPSKDVVRKMKSYWSKLLSAKLITQRKFDNLTKAERGGLTDDDKAGFIKRQLVETRQITKHVARILDERFNTETDENNKKIRQVKIVTLKSNLVSNFRKEFELYKVREINDYHHAHDAYLNAVIGKALLGVYPQLEPEFVYGDYPHFHGHKENKATAKKFFYSNIMNFFKKDDVRTDKNGEIIWKKDEHISNIKKVLSYPQVNIVKKVEEQTGGFSKESILPKGNSYKLIPRKTKKFYWDTKKYGGFDSPIVAYSILVIADIEKGKSKKLKTVKALVGVTIMEKMTFERDPVAFLERKGYRNVQEENIIKLPKYSLFKLENGRKRLLASARELQKGNEIVLPNHLGTLLYHAKNIHKVDEPKHLDYVDKHKDEFKELLDVVSNFSKKYTLAEGNLEKIKELYAQNNGEDLKELASSFINLLTFTAIGAPAAFKFFDKNIDRKRYTSTTEILNATLIHQSITGLYETRIDLSKLGGD

SEQ ID NO: 1236 - protein, 1345 aa, Streptococcus mutans
MKKPYSIGLDIGTNSVGWAVVTDDYKVPAKKMKVLGNTDKSHIKKNLLGALLFDSGNTAEDRRLKRTARRRYTRRRNRILYLQEIFSEEMGKVDDSFFHRLEDSFLVTEDKRGERHPIFGNLEEEVKYHENFPTIYHLRQYLADNPEKTDLRLVYLALAHIIKFRGHFLIEGKFDTRNNDVQRLFQEFLAVYDNTFENSSLQEQNVQVEEILTDKISKSAKKDRVLKLFPNEKSNGRFAEFLKLIVGNQADFKKHFELEEKAPLQFSKDIYEEELEVLLAQIGDNYAELFLSAKKLYDSILLSGILTVTDVSTKAPLSASMIQRYNEHQMDLAQLKQFIRQKLSDKYNEVFSDVSKDGYAGYIDGKTNQEAFYKYLKGLLNKIEGSGYFLDKIEREDFLRKQRTFDNGSIPHQIHLQEMRAIIRRQAEFYPFLADNQDRIEKILTFRIPYYVGPLARGKSDFAWLSRKSADKITPWNFDEIVDKESSAEAFINRMTNYDLYLPNQKVLPKHSLLYEKFTVYNELTKVKYKTEQGKTAFFDANMKQEIFDGVFKVYRKVTKDKLMDFLEKEFDEFRIVDLTGLDKENKAFNASYGTYHDLRKILDKDFLDNSKNEKILEDIVLTLTLFEDREMIRKRLKNYSDLLTKEQLKKLERRHYTGWGRLSAELIHGIRNKESRKTILDYLIDDGNSNRNFMQLINDDALSFKEEIAKAQVIGETDNLNQVVSDIAGSLAIKKGILQSLKIVDELVKIMGHQPENIVVEMARENQFTNQGRRNSQQRLKGLTDSIKEFGSQILKEHPVENSQLQNDRLFLYYLQNGRDMYTGEELDIDYLSQYDIDHIIPQAFIKDNSIDNRVLTSSKENRGKSDDVPSKDVVRKMKSYWSKLLSAKLITQRKFDNLTKGERGGLTDDDKAGFIKRQLVETRQITKHVARILDERFNTETDENNKKIRQVKIVTLKSNLVSNFRKEFELYKVREINDYHHAHDAYLNAVIGKALLGVYPQLEPEFVYGDYPHFHGHKENKATAKKFFYSNIMNFFKKDDVRTDKNGEIIWKKDEYISNIKKVLSYPQVNIVKKVEEQTGGFFKESILPKGDSDKLIPRKTKKFYWDTKKYGGFDSPIVAYSILVIADIEKGKSKKLKTVKALVGVTIMEKMTFERDPVAFLERKGYRNVQEENIIKLPKYSLFKLENGRKRLLASARELQKGNEIVLPNHLGTLLYHAKNIHKVDEPKHLDYVDKHKDEFKELLDVVSNFSKKYTLAEGNLEKIKELYAQNNGEDLKELASSFINLLTFTAIGAPATFKFFDKNIDRKRYTSTTEILNATLIHQSITGLYETRIDLSKLGGD

SEQ ID NO: 1237 - protein, 1345 aa, Streptococcus mutans
MKKPYSIGLDIGTNSVGWAVVTDDYKVPAKKMKVLGNTDKSHIKKNLLGALLFDSGNTAEDRRLKRTARRRYTRRRNRILYLQEIFSEEMGKVDDSFFHRLEDSFLVTEDKRGERHPIFGNLEEEVKYHENFPTIYHLRQYLADNPEKTDLRLVYLALAHIIKFRGHFLIEGKFDTRNNDVQRLFQEFLAVYDNTFENSSLQEQNVQVEEILTDKISKSAKKDRVLKLFPNEKSNGRFAEFLKLIVGNQADFKKHFELEEKAPLQFSKDIYEEELEVLLAQIGDNYAELFLSAKKLYDSILLSGILTVTDVSTKAPLSASMIQRYNEHQMDLAQLKQFIRQKLSDKYNEVFSDVSKDGYAGYIDGKTNQEAFYKYLKGLLNKIEGSGYFLDKIEREDFLRKQRTFDNGSIPHQIHLQEMRAIIRRQAEFYPFLADNQDRIEKILTFRIPYYVGPLARGKSDFAWLSRKSADKITPWNFDEIVDKESSVEAFINRMTNYDLYLPNQKVLPKHSLLYEKFTVYNELTKVKYKTEQGKTAFFDANMKQEIFDGVFKVYRKVTKDKLMDFLEKEFDEFRIVDLTGLDKENKAFNASYGTYHDLRKILDKDFLDNSKNEKILEDIVLTLTLFEDREMIRKRLKNYSDLLTKEQLKKLERRHYTGWGRLSAELIHGIRNKESRKTILDYLIDDGNSNRNFMQLINDDALSFKEEIAKAQVIGETDNLNQVVSDIAGSPAIKKGILQSLKIVDELVKIMGHQPENIVVEMARENQFTNQGRRNSQQRLKGLTDSIKEFGSQILKEHPVENSQLQNDRLFLYYLQNGRDMYTGEELDIDYLSQYDIDHIIPQAFIKDNSIDNRVLTSSKENRGKSDDVPSKDVVRKMKSYWSKLLSAKLITQRKFDNLTKAERGGLTDDDKAGFIKRQLVETRQITKHVARILDERFNTETDENNKKIRQVKIVTLKSNLVSNFRKEFELYKVREINDYHHAHDAYLNAVIGKALLGVYPQLEPEFVYGDYPHFHGHKENKATAKKFFYSNIMNFFKKDDVRTDKNGEIIWKKDEHISNIKKVLSYPQVNIVKKVEEQTGGFSKESILPKGNSDKLIPRKTKKFYWDTKKYGGFDSPIVAYSILVIADIEKGKSKKLKTVKALVGVTIMEKMTFERDPVAFLERKGYRNVQEENIIKLPKYSLFKLENGRKRLLASARELQKGNEIVLPNHLGTLLYHAKNIHKVDEPKHLDYVDKHKDEFKELLDVVSNFSKKYTLAEGNLEKIKELYAQNNGEDLKELASSFINLLTFTAIGAPATFKFFDKNIDRKRYTSTTEILNATLIHQSITGLYETRIDLNKLGGD

SEQ ID NO: 1238 - protein, 1345 aa, Streptococcus mutans; identical to SEQ ID NO: 1237

SEQ ID NO: 1239 - protein, 1345 aa, Streptococcus mutans; identical to SEQ ID NO: 1234

SEQ ID NO: 1240 - protein, 1345 aa, Streptococcus mutans; identical to SEQ ID NO: 1235

SEQ ID NO: 1241 - protein, 1345 aa, Streptococcus mutans; identical to SEQ ID NO: 1236

SEQ ID NO: 1242 - protein, 1345 aa, Streptococcus mutans
MKKPYSIGLDIGTNSVGWAVVTDDYKVPAKKMKVLGNTDKSHIKKNLLGALLFDSGNTAEDRRLKRTARRRYTRRRNRILYLQEIFSEEMGKVDDSFFHRLEDSFLVTEDKRGERHPIFGNLEEEVKYHENFPTIYHLRQYLADNPEKVDLRLVYLALAHIIKFRGHFLIEGKFDTRNNDVQKLFQEFLAVYDNTFENSSLQEQNVQVEEILTDKISKSAKKDRVLKLFPNEKSNGRFAEFLKLIVGNQADFKKHFELEEKAPLQLSKDTYEEELEVLLAQIGDNYAELFLSAKKLYDSILLSGILTVTDVSTKAPLSASMIQRYNEHQMDLAQLKQFIRQKLSDKYNEVFSDVSKDGYAGYIDGKTNQEAFYKYLKGLLNKIEGSGYFLDKIEREDFLRKQRTFDNGSIPHQIHLQEMRAIIRRQAEFYPFLADNQDRIEKILTFRIPYYVGPLARGKSDFAWLSRKSADKITPWNFDEIVDKESSVEAFINRMTNYDLYLPNQKVLPKHSLLYEKFTVYNELTKVKYKTEQGKTAFFDANMKQEIFDGVFKVYRKVTKDKLMDFLEKEFDEFRIVDLTGLDKENKAFNASYGTYHDLRKILDKDFLDNSKNEKILEDIVLTLTLFEDREMIRKRLENYSDLLTKEQVKKLERRHYTGWGRLSAELIHGIRNKESRKTLLDYLIDDGNSNRNFMQLINDDALSFKEEIAKAQVIGETDNLNQVVSDIAGSPAIKKGILQSLKIVDELVKIMGHQPENIVVEMARENQFTNQGRRNSQQRLKGLTDSIKEFGSQILKEHPVENSQLQNDRLFLYYLQNGRDMYTGEELDIDYLSQYDIDHIIPQAFIKDNSIDNRVLTSSKENRGKSDDVPSKDVVRKMKSYWSKLLSAKLITQRKFDNLTKAERGGLTDDDKAGFIKRQLVETRQITKHVARILDERFNTETDENNKKIRQVKIVTLKSNLVSNFRKEFELYKVREINDYHHAHDAYLNAVIGKALLGVYPQLEPEFVYGDYPHFHGHKENKATAKKFFYSNIMNFFKKDDVRTDKNGEIIWKKDEYISNIKKVLSYPQVNIVKKVEEQTGGFSKESILPKGNSDKLIPRKTKKFYWDTKKYGGFDSPIVAYSILVIADIEKGKSKKLKTVKALVGVTIMEKMTFERDPIAFLERKGYRNVQEENIIKLPKYSLFKLENGRKRLLASARELQKGNEIVLPNHLGTLLYHAKNIHKVDEPKHLDYVDKHKDEFKELLDVVSNFSKKYTLAEGNLEKIKELYAQNNGEDLKELASSFINLLTFTAIGAPATFKFFDKNIDRKRYTSTTEILNATLIHQSITGLYETRIDLSKLGGD

SEQ ID NO: 1243 - protein, 1345 aa, Streptococcus mutans; identical to SEQ ID NO: 1242

SEQ ID NO: 1244 - protein, 1345 aa, Streptococcus mutans
MKKPYSIGLDIGTNSVGWAVVTDDYKVPAKKMKVLGNTDKSHIKKNLLGALLFDSGNTAEDRRLKRTARRRYTRRRNRILYLQEIFSEEMGKVDDSFFHRLEDSFLVTEDKRGERHPIFGNLEEEVKYHENFPTIYHLRQYLADNPEKVDLRLVYLALAHIIKFRGHFLIEGKFDTRNNDVQRLFQEFLAVYDNTFENSSLQEQNVQVEEILTDKISKSAKKDRVLKLFPNEKSNGRFAEFLKLIVGNQADFKKHFELEEKAPLQFSKDTYEEDLEELLGKIGDDYADLFTLAKNLYDAILLSGILTADDSSTKAPLSASMIQRYNEHQMDLAQLKQFIRQKLSDKYNEVFSDVSKDGYAGYIDGKTNQEAFYKYLKGLLNKIEGSGYFLDKIEREDFLRKQRTFDNGSIPHQIHLQEMRAIIRRQAEFYPFLADNQDRIEKILTFRIPYYVGPLARGKSDFAWLSRKSADKITPWNFDEIVDKESSAEAFINRMTNYDLYLPNQKVLPKHSLLYEKFTVYNELTKVKYKTEQGKTAFFDANMKQEIFDGVFKVYRKVTKDKLMDFLEKEFDEFRIVDLTGLDKENKVFNASYGTYHDLCKILDKDFLDNSKNEKILEDIVLTLTLFEDREMIRKRLENYSDLLTKEQVKKLERRHYTGWGRLSAELIHGIRNKESRKTILDYLIDDGNSNRNFMQLINDDALSFKEEIAKAQVIGETDNLNQVVSDIAGSPAIKKGILQSLKIVDELVKIMGHQPENIVVEMARENQFTNQGRRNSQQRLKGLTDSIKEFGSQILKEHPVENSQLQNDRLFLYYLQNGRDMYTGEELDIDYLSQYDIDHIIPQAFIKDNSIDNRVLTSSKENRGKSDDVPSKDVVRKMKSYWSKLLSAKLITQRKFDNLTKAERGGLTDDDKAGFIKRQLVETRQITKHVARILDERFYTETDENNKKIRQVKIVTLKSNLVSNFRKEFELYKVREINDYHHAHDAYLNAVIGKALLGVYPQLEPEFVYGDYPHFHGHKENKATAKKFFYSNIMNFFKKDDVRTDKNGEIIWKKDEHISNIKKVLSYPQVNIVKKVEEQTGGFSKESILPKGNSDKLIPRKTKKFYWDTKKYGGFDSPIVAYSILVIADIEKGKSKKLKTVKALVGVTIMEKMTFERDPVAFLERKGYRNVQEENIIKLPKYSLFKLENGRKRLLASARELQKGNEIVLPNHLGTLLYHAKNIHKVDEPKHLDYVDKHKDEFKELLDVVSNFSKKYTLAEGNLEKIKELYAQNNGEDLKELASSFINLLTFTAIGAPATFKFFDKNIDRKRYTSTTEILNATLIHQSITGLYETRIDLSKLGGD

SEQ ID NO: 1245 - protein, 1345 aa, Streptococcus mutans
MKKPYSIGLDIGTNSVGWAVVTDDYKVPAKKMKVLGNTDKSHIKKNLLGALLFDSGNTAEDRRLKRTARRRYTRRRNRILYLQEIFSEEMGKVDDSFFHRLEDSFLVTEDKRGERHPIFGNLEEEVKYHENFPTIYHLRQYLADNPEKVDLRLVYLALAHIIKFRGHFLIEGKFDTRNNDVQRLFQEFLAVYDNTFENSSLQEQNVQVEEILTDKISKSAKKDRVLKLFPNEKSNGRFAEFLKLIVGNQADFKKHFELEEKAPLQFSKDTYEEDLEELLGKIGDDYADLFTLAKNLYDAILLSGILTADDSSTKAPLSASMIQRYNEHQMDLAQLKQFIRQKLSDKYNEVFSDVSKDGYAGYIDGKTNQEAFYKYLKGLLNKIEGSGYFLDKIEREDFLRKQRTFDNGSIPHQIHLQEMRAIIRRQAEFYPFLADNQDRIEKILTFRIPYYVGPLARGKSDFAWLSRKSADKITPWNFDEIVDKESSAEAFINRMTNYDLYLPNQKVLPKHSLLYEKFTVYNELTKVKYKTEQGKTAFFDANMKQEIFDGVFKVYRKVTKDKLMDFLEKEFDEFRIVDLTGLDKENKVFNASYGTYHDLCKILDKDFLDNSKNEKILEDIVLTLTLFEDREMIRKRLENYSDLLTKEQVKKLERRHYTGWGRLSAELIHGIRNKESRKTILDYLIDDGNSNRNFMQLINDDALSFKEEIAKAQVIGETDNLNQVVSDIAGSPAIKKGILQSLKIVDELVKIMGHQPENIVVEMARENQFTNQGRRNSQQRLKGLTDSIKEFGSQILKEHPVENSQLQNDRLFLYYLQNGRDMYTGEELDIDYLSQYDIDHIIPQAFIKDNSIDNRVLTSSKENRGKSDDVPSKDVVRKMKPYWSKLLSAKLITQRKFDNLTKAERGGLTDDDKAGFIKRQLVETRQITKHVARILDERFNTETDENNKKIRQVKIVTLKSNLVSNFRKEFELYKVREINDYHHAHDAYLNAVIGKALLGVYPQLEPEFVYGDYPHFHGHEENKATAKKFFYSNIMNFFKKDDVRTDKNGEIIWKKDEHISNIKKVLSYPQVNIVKKVEEQTGGFSKESILPKGNSDKLIPRKTKKFYWDTKKYGGFDSPIVAYSILVIADIEKGKSKKLKTVKALVGVTIMEKMTFERDPVAFLERKGYRNVQEENIIKLPKYSLFKLENGRKRLLASARELQKGNEIVLPNHLGTLLYHAKNIHKVDEPKHLDYVDKHKDEFKELLDVVSNFSKKYTLAEGNLEKIKELYAQNNGEDLKELASSFINLLTFTAIGAPATFKFFDKNIDRKRYTSTTEILNATLIHQSITGLYETRIDLSKLGGD

SEQ ID NO: 1246 - protein, 1345 aa, Streptococcus mutans
MKKPYSIGLDIGTNSVGWAVVTDDYKVPAKKMKVLGNTDKSHIKKNLLGALLFDSGNTAEDRRLKRTARRRYTRRRNRILYLQEIFSEEMGKVDDSFFHRLEDSFLVTEDKRGERHPIFGNLEEEVKYHENFPTIYHLRQYLADNPEKVDLRLVYLALAHIIKFRGHFLIEGKFDTRNNDVQRLFQEFLAVYDNTFENSSLQEQNVQVEEILTDKISKSAKKDRVLKLFPNEKSNGRFAEFLKLIVGNQADFKKHFELEEKAPLQFSKDTYEEELEVLLAQIGDNYAELFLSAKKLYDSILLSGILTVTDVSTKAPLSASMIQRYNEHQMDLAQLKQFIRQKLSDKYNEVFSDVSKDGYAGYIDGKTNQEAFYKYLKGLLNKIEGSGYFLDKIEREDFLRKQRTFDNGSIPHQIHLQEMRAIIRRQAEFYPFLADNQDRIEKILTFRIPYYVGPLARGKSDFAWLSRKSADKITPWNFDEIVDKESSAEAFINRMTNYDLYLPNQKVLPKHSLLYEKFTVYNELTKVKYKTEQGKTAFFDANMKQEIFDGVFKVYRKVTKDKLMDFLEKEFDEFRIVDLTGLDKENKVFNASYGTYHDLCKILDKDFLDNSKNEKILEDIVLTLTLFEDREMIRKRLENYSDLLTKEQVKKLERRHYTGWGRLSAELIHGIRNKESRKTILDYLIDDGNSNRNFMQLINDDALSFKEEIAKAQVIGETDNLNQVVSDIAGSPAIKKGILQSLKIVDELVKIMGHQPENIVVEMARENQFTKQGRRNSQQRLKGLTDSIKEFGSQILKEHPVENSQLQNDRLFLYYLQNGRDMYTGEELDIDYLSQYDIDHIIPQAFIKDNSIDNRVLTSSKENRGKSDDVPSKDVVRKMKSYWSKLLSAKLITQRKFDNLTKAERGGLTDDDKAGFIKRQLVETRQITKHVARILDERFYTETDENNKKIRQVKIVTLKSNLVSNFRKEFELYKVREINDYHHAHDAYLNAVIGKALLGVYPQLEPEFVYGDYPHFHGHKENKATAKKFFYSNIMNFFKKDDVRTDKNGEIIWKKDEHISNIKKVLSYPQVNIVKKVEEQTGGFSKESILPKGNSDKLIPRKTKKFYWDTKKYGGFDSPIVAYSILVIADIEKGKSKKLKTVKALVGVTIMEKMTFERDPVAFLERKGYRNVQEENIIKLPKYSLFKLENGRKRLLASARELQKGNEIVLPNHLGTLLYHAKNIHKVDEPKHLDYVDKHKDEFKELLDVVSNFSKKYTLAEGNLEKIKELYAQNNGEDLKELASSFINLLTFTAIGAPATFKFFDKNIDRKRYTSTTEILNATLIHQSITGLYETRIDLSKLGGD

SEQ ID NO: 1247 - protein, 1345 aa, Streptococcus mutans
MKKPYSIGLDIGTNSVGWAVVTDDYKVPAKKMKVLGNTDKSHIKKNLLGALLFDSGNTAEDRRLKRTARRRYTRRRNRILYLQEIFSEEMGKVDDSFFHRLEDSFLVTEDKRGERHPIFGNLEEEVKYHENFPTIYHLRQYLADNPEKVDLRLVYLALAHIIKFRGHFLIEGKFDTRNNDVQRLFQEFLAVYDNTFENSSLQEQNVQVEEILTDKISKSAKKDRVLKLFPNEKSNGRFAEFLKLIVGNQADFKKHFELEEKAPLQFSKDTYEEELEVLLAQIGDNYAELFLSAKKLYDSILLSGILTVTDVSTKAPLSASMIQRYNEHQMDLAQLKQFIRQKLSDKYNEVFSDVSKDGYAGYIDGKTNQEAFYKYLKGLLNKIEGSGYFLDKIEREDFLRKQRTFDNGSIPHQIHLQEMRAIIRRQAEFYPFLADNQDRIEKILTFRIPYYVGPLARGKSDFAWLSRKSADKITPWNFDEIVDKESSAEAFINRMTNYDLYLPNQKVLPKHSLLYEKFTVYNELTKVKYKTEQGKTAFFDANMKQEIFDGVFKVYRKVTKDKLMDFLEKEFDEFRIVDLTGLDKENKVFNASYGTYHDLCKILDKDFLDNSKNEKILEDIVLTLTLFEDREMIRKRLENYSDLLTKEQVKKLERRHYTGWGRLSAELIHGIRNKESRKTILDYLIDDGNSNRNFMQLINDDALSFKEEIAKAQVIGETDNLNQVVSDIAGSPAIKKGILQSLKIVDELVKIMGHQPENIVVEMARENQFTKQGRRNSQQRLKGLTDSIKEFGSQILKEHPVENSQLQNDRLFLYYLQNGRDMYTGEELDIDYLSQYDIDHIIPQAFIKDNSIDNRVLTSSKENRGKSDDVPSKDVVRKMKSYWSKLLSAKLITQRKFDNLTKAERGGLTDDDKAGFIKRQLVETRQITKHVARILDERFYTETDENNKKIRQVKIVTLKSNLVSNFRKEFELYKVREINDYHHAHDAYLNAVIGKALLGVYPQLEPEFVYGDYPHFHGHKENKATAKKFFYSNIMNFFKKDDVRTDRNGEIIWKKDEHISNIKKVLSYPQVNIVKKVEEQTGGFSKESILPKGNSDKLIPRKTKKFYWDTKKYGGFDSPIVAYSILVIADIEKGKSKKLKTVKALVGVTIMEKMTFERDPVAFLERKGYRNVQEENIIKLPKYSLFKLENGRKRLLASARELQKGNEIVLPNHLGTLLYHAKNIHKVDEPKHLDYVDKHKDEFKELLDVVSNFSKKYTLAEGNLEKIKELYAQNNGEDLKELASSFINLLTFTAIGAPATFKFFDKNIDRKRYTSTTEILNATLIHQSITGLYETRIDLSKLGGD

SEQ ID NO: 1248 - protein, 1345 aa, Streptococcus mutans
MKKPYSIGLDIGTNSVGWAVVTDDYKVPAKKMKVLGNTDKSHIKKNLLGALLFDSGNTAEDRRLKRTARRRYTRRRNRILYLQEIFSEEMGKVDDSFFHRLEDSFLVTEDKRGERHPIFGNLEEEVKYHENFPTIYHLRQYLADNPEKVDLRLVYLALAHIIKFRGHFLIEGKFDTRNNDVQRLFQEFLAVYDNTFENSSLQEQNVQVEEILTDKISKSAKKDRVLKLFPNEKSNGRFAEFLKLIVGNQADFKKHFELEEKAPLQFSKDTYEEELEVLLAQIGDNYAELFLSAKKLYDSILLSGILTVTDVSTKAPLSASMIQRYNEHQMDLAQLKQFIRQKLSDKYNEVFSDVSKDGYAGYIDGKTNQEAFYKYLKGLLNKIEGSGYFLDKIEREDFLRKQRTFDNGSIPHQIHLQEMRAIIRRQAEFYPFLADNQDRIEKILTFRIPYYVGPLARGKSDFAWLSRKSADKITPWNFDEIVDKESSAEAFINRMTNYDLYLPNQKVLPKHSLLYEKFTVYNELTKVKYKTEQGKTAFFDANMKQEIFDGVFKVYRKVTKDKLMDFLEKEFDEFRIVDLTGLDKENKVFNASYGTYHDLCKILDKDFLDNSKNEKILEDIVLTLTLFEDREMIRKRLENYSDLLTKEQVKKLERRHYTGWGRLSAELIHGIRNKESRKTILDYLIDDGNSNRNFMQLINDDALSFKEEIAKAQVIGETDNLNQVVSDIAGSPAIKKGILQSLKIVDELVKIMGHQPENIVVEMARENQFTNQGRQNSQQRLKGLTDSIKEFGSQILKEHPVENSQLQNDRLFLYYLQNGRDMYTGEELDIDYLSQYDIDHIIPQAFIKDNSIDNRVLTSSKENRGKSDDVPSEDVVRKMKSYWSKLLSAKLITQRKFDNLTKAERGGLTDDDKAGFIKRQLVETRQITKHVARILDERFYTETDENNKKIRQVKIVTLKSNLVSNFRKEFELYKVREINDYHHAHDAYLNAVIGKALLGVYPQLEPEFVYGDYPHFHGHKENKATAKKFFYSNIMNFFKKDDVRTDKNGEIIWKKDEHISNIKKVLSYPQVNIVKKVEEQTGGFSKESILPKGNSDKLIPRKTKKFYWDTKKYGGFDSPIVAYSILVIADIEKGKSKKLKTVKALVGVTIMEKMTFERDPVAFLERKGYRNVQEENIIKLPKYSLFKLENGRKRLLASARELQKGNEIVLPNHLGTLLYHAKNIHKVDEPKHLDYVDKHKDEFKELLDVVSNFSKKYTLAEGNLEKIKELYAQNNGEDLKELASSFINLLTFTAIGAPATFKFFDKNIDRKRYTSTTEILNATLIHQSITGLYETRIDLSKLGGD

SEQ ID NO: 1249 - protein, 1345 aa, Streptococcus mutans; identical to SEQ ID NO: 1248

SEQ ID NO: 1250 - protein, 1345 aa, Streptococcus mutans; identical to SEQ ID NO: 1244

SEQ ID NO: 1251 - protein, 1345 aa, Streptococcus mutans; identical to SEQ ID NO: 1245

SEQ ID NO: 1252 - protein, 1345 aa, Streptococcus mutans; identical to SEQ ID NO: 1246

SEQ ID NO: 1253 - protein, 1345 aa, Streptococcus mutans; identical to SEQ ID NO: 1247

SEQ ID NO: 1254 - protein, 1345 aa, Streptococcus mutans; identical to SEQ ID NO: 1246

SEQ ID NO: 1255 - protein, 1345 aa, Streptococcus mutans; identical to SEQ ID NO: 1246

SEQ ID NO: 1256 - protein, 1345 aa, Streptococcus mutans; identical to SEQ ID NO: 1246

SEQ ID NO: 1257 - protein, 1345 aa, Streptococcus mutans; identical to SEQ ID NO: 1247

SEQ ID NO: 1258 - protein, 1345 aa, Streptococcus mutans
MKKPYSIGLDIGTNSVGWAVVTDDYKVPAKKMKVLGNTDKSHIKKNLLGALLFDSGNTAEDRRLKRTARRRYTRRRNRILYLQEIFSEEMGKVNDSFFHRLEDSFLVTEDKRGERHPIFGNLEEEVKYHENFPTIYHLRQYLADNPEKVDLRLVYLALAHIIKFRGHFLIEGKFDTRNNDVQRLFQEFLAVYDNTFENSSLQEQNVQVEEILTDKISKSAKKDRVLKLFPNEKSNGRFAEFLKLIVGNQADFKKHFELEEKAPLQFSKDTYEEELEVLLAQIGDNYAELFLSAKKLYDSILLSGILTVTDVSTKAPLSASMIQRYNEHQMDLAQLKQFIRQKLSDKYNEVFSDVSKDGYAGYIDGKTNQEAFYKYLKGLLNKIEGSGYFLDKIEREDFLRKQRTFDNGSIPHQIHLQEMRAIIRRQAEFYPFLADNQDRIEKILTFRIPYYVGPLARGKSDFAWLSRKSADKITPWNFDEIVDKESSAEAFINRMTNYDLYLPNQKVLPKHSLLYEKFTVYNELTKVKYKTEQGKTAFFDANMKQEIFDGVFKVYRKVTKDKLMDFLEKEFDEFRIVDLTGLDKENKVFNASYGTYHDLCKILDKDFLDNSKNEKILEDIVLTLTLFEDREMIRKRLENYSDLLTKEQVKKLERRHYTGWGRLSAELIHGIRNKESRKTILDYLIDDGNSNRNFMQLINDDALSFKEEIAKAQVIGETDNLNQVVSDIAGSPAIKKGILQSLKIVDELVKIMGHQPENIVVEMARENQFTKQGRRNSQQRLKGLTDSIKEFGSQILKEHPVENSQLQNDRLFLYYLQNGRDMYTGEELDIDYLSQYDIDHIIPQAFIKDNSIDNRVLTSSKENRGKSDDVPSKDVVRKMKSYWSKLLSAKLITQRKFDNLTKAERGGLTDDDKAGFIKRQLVETRQITKHVARILDERFYTETDENNKKIRQVKIVTLKSNLVSNFRKEFELYKVREINDYHHAHDAYLNAVIGKALLGVYPQLEPEFVYGDYPHFHGHKENKATAKKFFYSNIMNFFKKDDVRTDKNGEIIWKKDEYISNIKKVLSYPQVNIVKKVEEQTGGFSKESILPKGNSDKLIPRKTKKFYWDTKKYGGFDSPIVAYSILVIADIEKGKSKKLKTVKALVGVTIMEKMTFERDPIAFLERKGYRNVQEENIIKLPKYSLFKLENGRKRLLASARELQKGNEIVLPNHLGTLLYHAKNIHKVDEPKHLDYVDKHKDEFKELLDVVSNFSKKYTLAEGNLEKIKELYAQNNGEDLKELASSFINLLTFTAIGAPAAFKFFDKNIDRKRYTSTTEILNATLIHQSITGLYETRIDLSKLGGD

SEQ ID NO: 1259 - protein, 1345 aa, Streptococcus mutans; identical to SEQ ID NO: 1258

SEQ ID NO: 1260 - protein, 1345 aa, Streptococcus mutans
MKKPYSIGLDIGTNSVGWAVVTDDYKVPAKKMKVLGNTDKSHIKKNLLGALLFDSGNTAEDRRLKRTTRRRYTRRRNRILYLQEIFSEEMGKVDDSFFHRLEDSFLVTEDKRGERHPIFGNLEEEVKYHENFPTIYHLRQYLADNPEKTDLRLVYLALAHIIKFRGHFLIEGKFDTRNNDVQRLFQEFLAVYDNTFENSSLQEQNVQVEEILTDKISKSAKKDRVLKLFPNEKSNGCFAEFLKLIVGNQADFKKHFELEEKAPLQFSKDTYEEELEVLLAQIGDNYAELFLSAKKLYDSILLSGILTVTDVSTKAPLSASMIQRYNEHQMDLTQLKQFIRQKLSDKYNEVFSDVSKDGYAGYIDGKTNQEAFYKYLKGLLNKIEGSGYFLDKIEREDFLRKQRTFDNGSIPHQIHLQEMRAIIRRQAEFYPFLADNQDRIEKLLTFRIPYYVGPLASGKSDFAWLSRKSADKITPWNFDEIVDKESSAEAFINRMTNYDLYLPNQKVLPKHSLLYEKFTVYNELTKVKYKTEQGKTAFFDANMKQEIFDGVFKVYRKVTKDKLMDFLEKEFDEFRIVDLTGLDKENKVFNASYGTYHDLCKILDKDFLDNSKNEKILEDIVLTLTLFEDREMIRKRLENYSDLLTKEQVKKLERRHYTGWGRLSAELIHGIRNKESRKTILDYLIDDGNSNRNFMQLINDDALSFKEEIAKAQVIGETDNLNQVVSDIAGSPAIKKGILQSLKIVDELVKIMGHQPENIVVEMARENQFTNQGRRNSQQRLKGLTDSIKEFGSQILKEHPVENSQLQNDRLFLYYLQNGRDMYTGEELDIDYLSQYDIDHIIPQAFIKDNSIDNRVLTSSKENRGKSDDVPSKDVVRKMKSYWSKLLSAKLITQRKFDNLTKAERGGLTDDDKAGFIKRQLVETRQITKHVARILDERFNTETDENNKKIRQVKIVTLKSNLVSNFRKEFELYKVREINDYHHAHDAYLNAVIGKALLGVYPQLEPEFVYGDYPHFHGHKENKATAKKFFYSNIMNFFKKDDVRTDKNGEIIWKKDEHISNIKKVLSYPQVNIVKKVEEQTGGFSKESILPKGNSDKLIPRKTKKFYWDTKKYGGFDSPIVAYSILVIADIEKGKSKKLKTVKALVGVTIMEKMTFERDPVAFLERKGYRNVQEENIIKLPKYSLFKLENGRKRLLASARELQKGNEIVLPNHLGTLLYHAKNIHKVDEPKHLDYVDKHKDEFKELLDVVSNFSKKYTLAEGNLEKIKELYAQNNGEDLKELASSFINLLTFTAIGAPATFKFFDKNIDRKRYTSTTEILNATLIHQSITGLYETRIDLSKLGGD

SEQ ID NO: 1261 - protein, 1345 aa, Streptococcus mutans; identical to SEQ ID NO: 1260

SEQ ID NO: 1262 - protein, 1350 aa, Streptococcus mutans
MKKPYSIGLDIGTNSVGWAVVTDDYKVPAKKMTVLGNTDKSHIKKNLLGALLFDSGNTAADRRLKRTARRRYTRRRNRILYLQEIFAEEMSKVDDSFFHRLEDSFLVTEDKRGERHPIFGNLEEEVKYHENFPTIYHLRQYLADNPEKVDLRLVYLALAHIIKFRGHFLIEGKFDTRNNDVQRLFQEFLAVYDNTFENSSLQEQNVQVEEILTDKISKSAKKDRVLKLFPNEKSNGRFAEFLKLIVGNQADFKKHFELEEKTPLQFSKDTYEEELEVLLAQIGDNYAELFLSAKKLYDSILLSGILTVTDVSTKAPLSASMIQRYNEHQMDLAQLKQFIRQKLSDKYNEVFSDVSKDGYAGYIDGKTNQEAFYKYLKGLLNKIEGSGYFLDKIEREDFLRKQRTFDNGSIPHQIHLQEMRAIIRRQAEFYPFLADNQDRIEKILTFRIPYYVGPLARGKSDFAWLSRKSADKITPWNFDEIVDKESSAEAFINRMTNYDLYLPNQKVLPKHSLLYEKFTVYNELTKVKYKTEQGKTAFFDANMKQEIFDGVFKVYRKVTKDKLMDFLEKEFDEFRIVDLTGLDKENKAFNASYGTYHDLRKILDKDFLDNSKNEKILEDIVLTLTLFEDREMIRKRLENYSDLLTKEQVKKLERRHYTGWGRLSAELIHGIRNKESRKTILDYLIDDGNSNRNFMQLINDDALSFKEEIAKAQVIGETDNLNQVVSDIAGSPAIKKGILQSLKIVDELVKIMGHQPENIVVEMARENQFTNQGRRNSQQRLKGLTDSIKEFGSQILKEHPVENSQLQNDRLFLYYLQNGRDMYTGEELDIDYLSQYDIDHIIPQAFIKDNSIDNRVLTSSKENRGKSDDVPSEDVVNRMRPFWNKLLSSGLISQRKYNNLTKKELTPDDKAGFIKRQLVETRQITKHVARMLDERFNKEFDDNNKRIRRVKIVTLKSNLVSSFRKEFELYKVREINDYHHAHDAYLNAVVVKALLVKYPKLEPEFVYGEYPKYNSYRERKTATQKMFFYSNIMNMFKSKVKLADDQIVERPMIEVNDETGEIAWDKTKHITTVKKVLSYPQVNIVKKVEEQTIGQNGGLFDDNPKSPLEVIPSKLVPLKKALNPEKYGGYQKPTTAYPILLIVDTKQLIPISVMDKKRFEQNPVKFLKDKGYQQIEKNNFVKLPKYTLVDIGNGIKRLWASSKEVHKGNQLVVSKKSQDLLYHAHHLDNDYSNEYVKNHYQQFDILFNEITSFSKKCKLGKEHIQKIEEAYSKERDSASIEELADGFIKLLGFTQLGATSPFSFLGIKLNQKQYTGKKDYLLPCMEATLIHQSITGLYETRIDLSKLGGD

SEQ ID NO: 1263 - protein, 1350 aa, Streptococcus mutans; identical to SEQ ID NO: 1262

SEQ ID NO: 1264 - protein, 1345 aa, Streptococcus mutans
MKKPYSIGLDIGTNSVGWAVVTDDYKVPDKKMKVLGNTDKSHIKKNLLGALLFDSGNTAEDRRLKRTARRRYTRRRNRILYLQEIFSEEMGKVDDSFFHRLEDSFLVTEDKRGERHPIFGNLEEEVKYHENFPTIYHLRQYLADNPEKTDLRLVYLALAHIIKFRGHFLIEGKFDTRNNDVQRLFQEFLAVYDNTFENSSLQEQNVQVEEILTDKISKSAKKDRVLKLFPNEKSNGRFAEFLKLIVGNQADFKKHFELEEKAPLQFSKDIYEEELEVLLAQIGDNYAELFLSAKKLYDSILLSGILTVTDVSTKAPLSASMIQRYNEHQMDLAQLKQFIRQKLSDKYNEVFSDVSKDGYAGYIDGKTNQEAFYKYLKGLLNKIEGSGYFLDKIEREDFLRKQRTFDNGSIPHQIHLQEMRAIIRRQAEFYPFLADNQDRIEKILTFRIPYYVGPLARGKSDFAWLSRKSADKITPWNFDEIVDKESSVEAFINRMTNYDLYLPNQKVLPKHSLLYEKFTVYNELTKVKYKTEQGKTAFFDANMKQEIFDGVFKVYRKVTKDKLMDFLEKEFDEFRIVDLTGLDKENKAFNASYGTYHDLRKILDKDFLDNSKNEKILEDIVLTLTLFEDREMIRKRLKNYSDLLTKEQLKKLERRHYTGWGRLSAELIHGIRNKESRKTILDYLIDDGNSNRNFMQLINDDALSFKEEIAKAQVIGETDNLNQVVSDIAGSPAIKKGILQSLKIVDELVKIMGHQPENIVVEMARENQFTNQGRRNSQQRLKGLTDSIKEFGSQILKEHPVENSQLQNDRLFLYYLQNGRDMYTGEELDIDYLSQYDIDHIIPQAFIKDNSIDNRVLTSSKENRGKSDDVPSKDVVRKMKSYWSKLLSAKLITQRKFDNLTKAERGGLTDDDKAGFIKRQLVETRQITKHVARILDERFYTETDENNKKIRQVKIVTLKSNLVSNFRKEFELYKVREINDYHHAHDAYLNAVIGKALLGVYPQLEPEFVYGDYPHFHGHKENKATAKKFFYSNIMNFFKKDDVRTDKNGEIIWKKDEHISNIKKVLSYPQVNIVKKVEEQTGGFSKESILPKGNSDKLIPRKTKKFYWDTKKYGGFDSPIVAYSILVIADIEKGKSKKLKTVKALVGVTIMEKMTFERDPVAFLERKGYRNVQEENIIKLPKYSLFKLENGRKRLLASARELQKGNEIVLPNHLGTLLYHAKNIHKVDEPKHLDYVDKHKDEFKELLDVVSNFSKKYTLAEGNLEKIKELYAQNNGEDLKELASSFINLLTFTAIGAPATFKFFDKNIDRKRYTSTTEILNATLIHQSITGLYETRIDLSKLGGD

SEQ ID NO: 1265 - protein, 1345 aa, Streptococcus mutans
MKKPYSIGLDIGTNSVGWAVVTDDYKVSAKKMKVLGNTDKSHIKKNLLGALLFDSGNTAEDRRLKRTARRRYTRRRNRILYLQEIFAEEMSKVDDSFFHRLEDSFLVTEDKRGERHPIFGNLEEEVKYHENFPTIYHLRQYLADNPEKVDLRLVYLALAHIIKFRGHFLIEGKFDTRNNDVQRLFQEFLAVYDNTFENSSLQEQNVQVEEILTDKISKSAKKDRVLKLFPNEKSNGRFAEFLKLIVGNQADFKKHFELEEKAPLQFSKDTYEEELEVLLAQIGDNYAELFLSAKKLYDSILLSGILTVTDVSTKAPLSASMIQRYNEHQMDLAQLKQFIRQKLSDKYNEVFSDVSKDGYAGYIDGKTNQEAFYKYLKGLLNKIEGSGYFLDKIEREDFLRKQRTFDNGSIPHQIHLQEMRAIIRRQAEFYPFLADNQDRIEKILTFRIPYYVGPLARGKSDFAWLSRKSADKITPWNFDEIVDKESSAEAFINRMTNYDLYLPNQKVLPKHSLLYEKFTVYNELTKVKYKTEQGKTAFFDANMKQEIFDGVFKVYRKVTKDKLMDFLEKEFDEFRIVDLTGLDKENKAFNASYGTYHDLRKILDKDFLDNSKNEKILEDIVLTLTLFEDREMIRKRLENYSDLLTKEQVKKLERRHYTGWGRLSAELIHGIRNKESRKTILDYLIDDGNSNRNFMQLINDDALSFKEEIAKAQVIGETDNLNQVVSDIAGSPAIKKGILQSLKIVDELVKIMGHQPENIVVEMARENQFTNQGRRNSQQRLKGLTDSIKEFGSQILKEHPVEHSQLQNDRLFLYYLQNGRDMYTGEELDIDYLSQYDIDHIIPQAFIKDNSIDNRVLTSSKENRGKSDDVPSKNVVRKMKSYWSKLLSAKLITQRKFDNLTKAERGGLTDDDKAGFIKRQLVETRQITKHVARILDERFHTETDENNKKIRQVKIVTLKSNLVSNFRKEFELYKVREINDYHHTHDAYLNAVIGKALLGVYPQLEPEFVYGDYPHFHGHKENKATAKKFFYSNIMNFFKKDDVRTDKNGEIIWKKDEHISNIKKVLSYPQVNIVKKVEEQTGGFSKESILPKGNSDKLIPRKTKKFYWDTKKYGGFDSPIVAYSILVIADIEKGKSKKLKTVKALVGVTIMEKMTFERDPVAFLERKGYRNVQEENIIKLPKYSLFKLENGRKRLLASARELQKGNEIVLPNHLGTLLYHAKNIHKVDEPKHLDYVDKHKDEFKELLDVVSNFSKKYTLAEGNLEKIKELYAQNNGEDLKELASSFINLLTFTAIGAPATFKFFDKNIDRKRYTSTTEILNATLIHQSITGLYETRIDLSKLGGD

SEQ ID NO: 1266 - protein, 1345 aa, Streptococcus mutans; identical to SEQ ID NO: 1265

SEQ ID NO: 1267 - protein, 1345 aa, Streptococcus mutans
MKKPYSIGLDIGTNSVGWSVVTDDYKVPAKKMKVLGNTDKSHIEKNLLGALLFDSGNTAEDRRLKRTARRRYTRRRNRILYLQEIFSEEMGKVDDSFFHRLEDSFLVTEDKRGERHPIFGNLEEEVKYHENFPTIYHLRQYLADNPEKVDLRLVYLALAHIIKFRGHFLIEGKFDTRNNDVQRLFQEFLAVYDNTFENSSLQEQNVQVEEILTDKISKSAKKDRVLKLFPNEKSNGRFAEFLKLIVGNQADFKKHFELEEKAPLQFSKDTYEEELEVLLAQIGDNYAELFLSAKKLYDSILLSGILTVTDVGTKAPLSASMIQRYNEHQMDLAQLKQFIRQKLSDKYNEVFSDVSKDGYAGYIDGKTNQEAFYKYLKGLLNKIEGSGYFLDKIEREDFLRKQRTFDNGSIPHQIHLQEMRAIIRRQAEFYPFLADNQDRIEKLLTFRIPYYVGPLARGKSDFAWLSRKSADKITPWNFDEIVDKESSAEAFINRMTNYDLYLPNQKVLPKHSLLYEKFTVYNELTKVKYKTEQGKTAFFDANMKQEIFDGVFKVYRKVTKDKLMDFLEKEFDEFRIVDLTGLDKENKVFNASYGTYHDLCKILDKDFLDNSKNEKILEDIVLTLTLFEDREMIRKRLENYSDLLTKEQVKKLERRHYTGWGRLSAELIHGIRNKESRKTILDYLIDDGNSNRNFMQLINDDALSFKEEIAKAQVIGETDNLNQVVSDIAGSPAIKKGILQSLKIVDELVKIMGHQPENIVVEMARENQFTNQGRRNSQQRLKGLTDSIKEFGSQILKEHPVENSQLQNDRLFLYYLQNGRDMYTGEELDIDYLSQYDIDHIIPQAFIKDNSIDNRVLTSSKENRGKSDDVPSKDVVRKMKSYWSKLLSAKLITQRKFDNLTKAERGGLTDDDKAGFIKRQLVETRQITKHVARILDERFNTETDENNKKIRQVKIVTLKSNLVSNFRKEFELYKVREINDYHHAHDAYLNAVIGKALLGVYPQLEPEFVYGDYPHFHGHKENKATAKKFFYSNIMNFFKKDDVRIDKNGEIIWKKDEHISNIKKVLSYPQVNIVKKVEEQTGGFSKESILPKGNSDKLIPRKTKKFYWDTKKYGGFDSPIVAYSILVIADIEKGKSKKLKTVKALVGVTIMEKMTFERDPVAFLERKGYRNVQEENIIKLPKYSLFKLENGRKRLLASARELQKGNEIVLPNHLGTLLYHAKNIHKVDEPKHLDYVDKHKDEFKELLDVVSNFSKKYTLAEGNLEKIKELYAQNNGEDLKELASSFINLLTFTAIGAPATFKFFDKNIDRKRYTSTTEILNATLIHQSITGLYETRIDLSKLGGD

SEQ ID NO: 1268 - protein, 1345 aa, Streptococcus mutans; identical to SEQ ID NO: 1267

SEQ ID NO: 1269 - protein, 1355 aa, Streptococcus mutans
MKKSYSIGLDIGTNSVGWAVVTDDYKVPAKKMKVLGNTDKSHIKKNLLGALLFDSGNTAEDRRLKRTARRRYTRRRNRILYLQEIFSEEMGKVDDSFFHRLDESFLTDDDKNFDSHPIFGNKAEEDAYHQKFPTIYHLRKHLADSTEKADLRLVYLALAHMIKFRGHFLIEGELNAENTDVQKLFADFVGVYDRTFDDSHLSEITVDASSILTEKISKSRRLEKLINNYPKEKKNTLFGNLIALSLGLQPNFKTNFKLSEDAKLQFSKDTYEEDLEELLGKIGDDYADLFTLAKNLYDAILLSGILTADDSSTKAPLSASMIKRYAEHHEDLEKLKEFIKANKPELYHDIFKDETKNGYAGYIENGVKQDEFYKYLKNTLSKIAGSDYFLDKIEREDFLRKQRTFDNGSIPHQIHLQEMHAILRRQGDYYPFLKENQDRIEKILTFRIPYYVGPLARKNSRFAWAEYHSDEAVMPWNFDQVIDKESSAQAFIEHMTNNDLYLPNEKVLPKHSPLYEKYTVYNELTKIKYVTEIGEAKFFDANLKQEIFDGLFKHERKVTKKKLRTFLDKNFDEFRIVDIQGLDKETETFNASYATYQDLLKVIKDKVFMDNPENAEILENIVLTLTLFEDREMIKQRLAKYADVFDKKVIDQLARRHYTGWGRLSAKLLNGIRDKQSCKTIMDYLIDDAQSNRNLMQLITDDNLTFKDDIVKAQYVDNSDDLHQVVQSLAGSPAIKKGILQSLKIVDELVKVMGKEPEQIVVEMARENQTTAKGRRNSQQRYKRLKEAIKSLDRDLNHKILKEHPTDNQALQNNRLFLYYLQNGRDMYTGESLDINRLSDYDIDHVIPQAFIKDNSIDNRVLTSSKANRGKSDDVPSEDVVNRMRPFWNKLLSSGLISQRKYNNLTKKELTPDDKAGFIKRQLVETRQITKHVARMLDERFNKEFDDNNKRIRRVKIVTLKSNLVSSFRKEFELYKVREINDYHHAHDAYLNAVVVKALLVKYPKLEPEFVYGEYPKYNSYRERKTATQKMFFYSNIMNMFKSKVKLADDQIVERPMIEVNDETGEIAWDKTKHITTVKKVLSYPQVNIVKKVEEQTIGQNGGLFDDNPKSPLEVIPSKLVPLKKALNPEKYGGYQKPTTAYPILLIVDTKQLIPISVMDKKRFEQNPVKFLKDKGYQQIEKNNFVKLPKYTLVDIGNGIKRLWASSKEVHKGNQLVVSKKSQDLLYHAHHLDNDYSNEYVKNHYQQFDILFNEITSFSKKCKLGKEHIQKIEEAYSKERDSASIEELADGFIKLLGFTQLGATSPFSFLGIKLNQKQYTGKKDYLLPCMEATLIHQSITGLYETRIDLNKLGGD

SEQ ID NO: 1270 - protein, 1355 aa, Streptococcus mutans; identical to SEQ ID NO: 1269

SEQ ID NO: 1271 - protein, 1125 aa, Streptococcus mutans
MTNGKILGLDIGIASVGVGIINAKTGNVEHASSRIFPAANADNNVERRSARGGRRLIRRKKHRLKRVEDLFEKYNIDTDFSNLNLNPYQLRVKGLNEQLSNEELFAILKNIAKRRGISYLDDAEDDSVGSSDYAKAIDENRKLLKKQTPGEIQLKRLEKYGQLRGNFTIQDENGEYHRLINVFSTSDYVKEARRILETQSYYNKFITESFVEDYIKILQGKRKYYVGPGNEKSRTDYGIYRTDGETLDNLFGILIGKCGFYPEEYRAAKASYTAQEYNFLNDLNNLTVPTETKKLSTEQKYQLVDFAKTASTLEAAKLLKEIAKLVGCQVEEIKGYRLDNKDKPDLHTFEPFRKLKSNLTTIAVENLSITTLDTLAHILTLNTEREGIEEAIQKELPNIFSDEQITGIIAVRKKNSQIFGKGWHSFSIKLMKELIPELYETSEEQMTILIRLKKVKTNSKITNRTKYINEQEVTDEIYNPVVSKSIRQTVKIINAAIKKYGAFDQIVIEMPRESNEEDERKFIADLQKSNAKEKDDAMKQAALLYNGKAELPHGVFHGHKELATKIRLWYQQGERCLYSGKHIDIHDLIHNQHMFEIDHVLPLSLSFDDSLANKVLVYSWANQEKGQRTPFQALPQMASAWSFRELRDYISKQKGISKKKRDYLLTEQDINKVEVKQKFIERNLVDTRYVSRVVLNTLQDALKVMNKETKISVIRGQFTSQLRRQWRIDKSRETYHHHAVDALIIAASSQLRLWKKQNNPMFAEDKHGQKINLDTGEVLSDDAYKELVYQAPYQGFVNTISSKSFEDEILFSYQVDSKVNRKISDATIYATRQAQLGKDKKEETYVLGKIKDIYSQAGYDAFRKKYDKDKAVFLMYQKDPETWEKVIEVILRDYKELDDKGKEIGNPFERYKVKHGFVRKYSRKNKGTEIKSLKYYDNKLGNHIDITPNNSKHSVVLQSINPWRADLYFNPETTKYELMGLKYADLSFEKGTGKYSISREKYDEIKEREGISSKSEFKFTLYKNDLILVKDIGNHKELIARFNSKNDTSKHYVELKPWNKAKFDSEEELIPAFGKVAKSGQFIKGLNKPDLSIYKVKTDILGHKYYIKKEGDKPKLNFENKIKNK

SEQ ID NO: 1272 - protein, 1125 aa, Streptococcus mutans
MTNGKILGLDIGIASVGVGIINAKTGNVEHASSRIFPAANADNNVERRSARGGRRLIRRKKHRLKRVEDLFEKYNIDTDFSNLNLNPYQLRVKGLNEQLSNEELFAILKNIAKRRGISYLDDAEDDSVGSSDYAKAIDENRKLLKKQTPGEIQLKRLEKYGQLRGNFTIQDENGEYHRLINVFSTSDYVKEARRILETQSYYNKFITESFVEDYIKILQGKRKYYVGPGNEKSRTDYGIYRTDGETLDNLFGILIGKCGFYPEEYRAAKASYTAQEYNFLNDLNNLTVPTETKKLSTEQKYQLVDFAKTASTLGAAKLLKEIAKLVGCQVEEIKGYRLDNKDKPDLHTFEPFRKLKSNLTTIAVENLSITTLDTLAHILTLNTEREGIEEAIQKELPNIFSDEQITEIIAVRKKNSQIFGKGWHSFSIKLMKELIPELYETSEEQMTILTRLKKVKTNSKITNRTKYINEEEITDEIYNPVVSKSIRQTVKIINATIKKYGAFDQIIIEMPRESNEEDERKFIADLQKSNAKEKDDAMKQAALLYNGKDELPHDVFHGHKELATKIRLWYQQGERCLYSGKHIDIHDLIHNQHMFEIDHVLPLSLSFDDSLANKVLVYSWANQEKGQRTPFQALPQMASAWSFRELRDYISKQKGISKKKRDYLLTEQDINKVEVKQKFIERNLVDTRYVSRVVLNTLQDALKVMNKETKISVIRGQFTSQLRRQWRIDKSRETYHHHAVDALIIAASSQLRLWKKQNNPMFAEDKHGQKINLDTGEVLSDDAYKELVYQAPYQGFVNTISSKSFEDEILFSYQVDSKVNRKISDATIYATRQAQLGKDKKEETYVLGKIKDIYSQAGYDAFRKKYDKDKAVFLMYQKDPETWEKVIEVILRDYKELDDKGKEIGNPFERYKVKHGFVRKYSRKNKGTEIKSLKYYDNKLGNHIDITPNNSKHSVVLQSINPWRADLYFNPETTKYELMGLKYADLSFEKGTGKYSISREKYDEIKEREGISSKSEFKFTLYKNDLILVKDIGNHKELIARFNSKNDTSKHYVELKPWNKAKFDSEEELIPAFGKVAKSGQFIKGLNKPDLSIYKVKTDILGHKYYIKKEGDKPKLNFENKIKNK

SEQ ID NO: 1273 - protein, 1125 aa, Streptococcus mutans; identical to SEQ ID NO: 1272

SEQ ID NO: 1274 - protein, 1125 aa, Streptococcus mutans; identical to SEQ ID NO: 1271

SEQ ID NO: 1275 - protein, 670 aa, Streptococcus oralis
MAKFNKNYSIGLDIGVSSVGYAVVTEDYRVPAFKFKVLGNTEKEKIKKNLIGSTTFVPAQSAQGTRVFRVNRRRIDRRNHRIAYLRDIFQKEIGKIDKNFYRRLDESFRVLGDKSEDIQIKQPFFGNKELETAYHKKYPTIYHLRKHLADADKNSPVADIREVYMALSHIFKYRGHFLTLGKIDPNNINMQNSWIDFIESCQDAFDLEISDESKTIAAIFKSSDNRQEKVKGILSYFQPELAKKDKSIFKQLLQLLFGLKTKFKECFELEEEPDLNFSKENYDENLENLLGTLEEDFPDVFAKLKILRDTILLSDMLTYTGATHARFSATMVERYEEHRKDLQRFKSFVKQNLSEQDYLDIFGRKTPNGFDVDKETKGYVGYISNKMVLTNKQKTIQQNFYDYISGKITGIEGAEYFLNKISDGTFLRKLRTTDNGTIPNQIHAYELEKIIERQGRDYPFLLENKDKLLSILTFKIPYYVGPLAKGNNSRFAWIKRTTSQDVLDNNDEDTKNGKIRPWNYHKLINMDETRDAFITNLIGNDIILLNEKVLPKRSLIYEEVMLQNELTRIKYKDKYGKIHFFDSELRQEIINNLFKTNSKRVSSAMLLAYLENFTNLQAVEIVSGIEKGKSLNSTLKTYNDLKTIFSEDLLDSEIYQKELEEIIKVITVFV

SEQ ID NO: 1276 - protein, 1373 aa, Streptococcus oralis
MENKNYSIGLDIGTNSVGWAVITDDYKVPSKKMKVLGNTDKRFIKKNLIGALLFDEGTTAEARRLKRTARRRYTRRKNRLRYLQEIFAEEMSKVDSSFFHRLDDSFLIPEDKKGSKYPIFATLIEEKEYHKQFPTIYHLRKQLADSKEKTDLRLIYLALAHMIKYRGHFLYEDTFDIKNNDIQKIFNEFISIYNNTFEGNSLSGQNVQVEAIFTDKISKSAKRERVLKLFPDEKSTGLFSEFLKLIVGNQADFKKHFDLEEKAPLQFSRDTYDEDLENLLGQIGDDFADLFVAAKKLYDAILLSGILTVTDPSTKAPLSASMIERYENHQKDLATLKQFIKTNLPEKYDEVFSDQSKDGYAGYIDGKTTQESFYKYIKNLLSKFEGADYFLEKIEREDFLRKQRTFDNGSIPHQIHLQEMNAILRRQGEHYPFLKENKEKIEKILTFRIPYYVGPLARGNRDFAWLTRNSDQAIRPWNFEEIVDKASSAESFINKMTNYDLYLPEEKVLPKHSLLYETFAVYNELTKVKFIAEGLRDYQFLDSRQKKDIFYTLFKAEDKRKVTEKDIIQYLHTVDGYDGIELKGIEKQFNASLSTYHDLLKIIKDKEFMDDPNNEEILENIVHTLTIFEDREMIKQRLAQYDSLFDEKVIKALTRRHYTGWGKLSSKLINGIRDKQTGKTILDYLMDDGYNNRNFMQLINDDELSFKEIIKKAQVVGKTDDVKQVVQELPGSPAIKKGILQSIKLVDELVKVMGHEPESIVIEMARENQTTARGKKNSQQRYKRIEDSLKILASGLNAKILKEHPTDNIQLQNDRLFLYYLQNGRDMYTGKPLDINQLSSYDIDHIVPQAFIKDDSLDNRVLTSLKDNRGKSDNVPSLEVVEKMKTFWQQLLDSKLISYRKFNNLTKAERGGLDERDKVGFIKRQLVETRQITKHVAQILDARYNTEVNEKDKKNRTVKIITLKSNLVSNFRKEFRLYKIREINDYHHAHDAYLNAVVAKAILKKYPKLEPEFVYGDYQKYDLKRYISRSKDPKEIEKATEKYFFYSNLLNFFKEEVHYADGTIVKRENIEYSKDTGEIAWNKEKDFATIKKVLSLPQVNIVKKREVQTGGFSKESILPKGNSDKLIPRKTKDILWDTTKYGGFDSPVIAYSILLIADIEKGKAKRLKTVKTLVGITIMEKATFEKSPIAFLENKGYHNVRKENILCLPKYSLFELKNGRRRMLASAKELQKGNEIVLPVHLTTLLYHAKNIHRLDEPEHLEYIQKHRNEFKGLLNLVSEFSQKYVLADANLEKIKNLYADNEQADIEILANSFINLLTFTALGAPAAFKFFGKDVDRKRYTTVSEILNATLIHQSITGLYETRIDLSKLGED

SEQ ID NO: 1277 - protein, 1371 aa, Streptococcus oralis
MENKNYSIGLDIGTNSVGWSVITDDYKVPSKKMKVLGNTDKRFIKKNLIGALLFDEGTTAEARRLKRTARRRYTRRKNRLRYLQEIFAEEMSKVDSSFFHRLDDSFLIPEDKRGSKYPIFATLAEEKEYHKQFPTIYHLRKQLADSKEKTDLRLIYLALAHMIKYRGHFLYEDTFDIKNNDIQKIFSEFISIYDNTFEGSSLSGQNAQVEAIFTDKISKSAKRERVLKLFPDEKSTGLFSEFLKLIVGNQADFKKHFDLGEKAPLQFSKDTYDEDLENLLGQIGDDFADLFLVAKKLYDAILLSGILTVTDPSTKAPLSASMIERYENHQKDLAVLKQFIKNNLPEKYDEVFSDQSKDGYAGYIDGKTTQEAFYKYIKNLLSKFEGTDYFLEKIEREDFLRKQRTFDNGSIPHQIHLQEMNAILRRQGEHYPFLKDNKEKIEKILTFRIPYYVGPLARGNRDFAWLTRNSDEAIRPWNFEEIVDKASSAEDFINKMTNYDLYLPEEKVLPKHSLLYETFAVYNELTKVKFIAEGLRDYQFLDSGQKKQIVTQLFKEKRKVTEKDIIQFLHNVDGYDGIELKGIEKQFNASLSTYHDLLKIIKDKEFMDDSKNEEILENIVHTLTIFEDREMIKQRLAQYDSLFDEKVIKALIRRHYTGWGKLSAKLIDGICDKQTGNTILDYLIDDGKNNRNFMQLINDDGLSFKEITQKAQVVGKTDDVKQVVQELPGSPAIKKGILQSIKIVDELVKVMGHTPESIVIEMARENQTTARGKKNSQQRYKRIEDALKNLASGLDSNILKEHPTNNIQLQNDRLFLYYLQNGRDMYTGKPLDINQLSSYDIDHIVPQAFIKDDSLDNRVLTSLKDNRGKSDNVPSIEVVQKRKAFWQQLLDSKLISERKFNNLTKAERGGLDERDKVGFIKRQLVETRQITKHVAQILDARFNKEVNEKDKKNRTVKIITLKSNLVSNFRKEFRLYKVREINDYHHAHDAYLNAVVAKAILKKYPKLEPEFVYGDYQKYDLKRYISRSRNPKEVEKATEKYFFYSNLLNFFKEEVHYADGTIVKRENIEYSKDTGEIAWNKEKDFATIKKVLSYPQVNIVKKREVQTGGFSKESILPKGNSDKLIPRKTKDILWETTKYGGFDSPVIAYSILLIADIEKGKAKKLKTVKTLVGITIMEKAAFEENPITFLENKGYHNVRKENILCLPKYSLFELENGRRRLLASAKELQKGNEIVLPVYLTTLLYHSKNVHKLDEPEHLEYIQKHRNEFKDLLNLVSEFSQKYVLADANLEKIQNLYADNEQADIEILANSFINLLTFTALGAPAAFKFFGKDIDRKRYTTVSEILNATLIHQSITGLYETRIDLSKLGED

SEQ ID NO: 1278 - protein, 1121 aa, Streptococcus oralis
MNGLVLGLDIGIASVGVGILEKNSGKIIHANSRLFPAATADNNVERRKNRQARRLNRRKKHRGVRFQDLFEDYGLLTDFSKVSINLNPYRLRVDGLNQQLTNEELFIALKNIVKRRGISYLDDASEDGGAVSSDYGKAVEENRKLLAEQTPGQIQLERFEKYGQVRGDFTVVENGEKCRLINVFSTSAYRKEAEKILRKQQEFNNQITDEFIEDYLKILTGKRKYYHGPGNEKSRTDYGRFRTDGTTLDNIFGVLIGKCTFYPNEYRASKSSYTAQEFNLLNDLNNLTVPTETKKLSEEQKKVIVEYAKEAKTLGASTLLKYIVKMIDASVDQISGYRVDVNNKPEMHTFEVYRKMQSLETISVGELSRNVLDELAHILTLNTEREGIEEAINSKLMGVFSQDQVLELVQFRKNNSSLFSKGWHNFSLKLMMELIPELYETSEEQMTILTRLGKQKSKETSKRTKYIDEKELTEEIYNPVVAKSVRQAIKIINEATKKHGIFDNIVIEMARENNEEDAKKDYIKRQKANQDEKNAAMEKAAFQYNGKKELPGNIFNGHKELATKIRLWHQQGEKCLYTGKTIPISDLIHNQYKYEIDHILPLSLSFDDSLSNKVLVHATANQEKGQRTPFQALDSMDDAWSYREFKSYVKDLKSLSNKKKDYLLTEEDISKIEVKQKFIERNLVDTRYSSRVVLNALQDFYKSHQFDTTISVVRGQFTSQLRRKWGLEKSRETYHHHAVDALIIAASSQLRLWKKQNNPLITYKEGQFVDSQTGEIISLTDDEYKELVFKAPYDHFVDTLHSKTFEDGILFSYQVDSKYNRKISDATIYATRKAKLDKDKSEETYVLGKIKDIYSQAGYDAFIKIYNKDKRKFLMYHKDPQTFEKVIEEILRTYPSKERNDKNKEVPCNPFEKYRQENGPIRKYSKKGNGPEIKCLKYYDNKLGNYIDISPDGSDNQVVLQSLKPWRTDVYFNHQTKEYELMGLKYSDLSFEKGSGKYSISNEKYNSIKRIEGVNEQSEFKFTLYKNDLILIKDSENNEQKLFRFNSRNDTAKHYVELKPYDKARFDGQQELITILGNVAKGGQCLKGLNKSNISIFKVKTDVLGKKHIIKKEGDEPKLKF

SEQ ID NO: 1279 - protein, 1134 aa, Streptococcus oralis
MNGLVLGLDIGIASVGVGILEKNSGKIVHASSRIFPAATADNNVERRKNRQARRLHRRKKHRGARLKDLFEYYGLLTDFSKVSINLNPYRLRVDGLDQQLTNEELFIALKNIVKRRGISYLDDASEDGGTVSSDYGKAVEENRKLLAEQTPGQIQLERFEKYGQLRGDFTVVENSEKCRLINVFSTSAYKKEAERILRKQQEFNNQITDEFIEDYLKILTGKRKYYHGPGNEKSRTDYGRFRTDGATLDNIFGILIGKCTFYPNEYRASKASYTAQEFNLLNDLNNLTVPTETKKLSEEQKKTIIEYAKSAKTLGASTLLKYIAKMIDASVDQIRGYRVDVNNKPEMHTFEVYRKMQSLETISVGELSRNILDELAHILTLNTEREGIEEAINTKLRDSFSQDQVLELVQFRKNNSSLFSKGWHNFSLKLMMELIPELYETSEEQMTILTRLGKQKSKETSKRTKYIDEKEVTEEIYNPVVAKSVRQAIKIINEATKKHGIFDNIVIEMARENNEEDAKKDYIKRQKANQDEKYAAMEKAAFQYNGKKELPDNIFHGHKELATKIRLWHQQGEKCLYTGKSIPISDLIHNQYKYEIDHILPLSLSFDDSLSNKVLVLATANQEKGQRTPFQALDSMDDAWSYREFKSYVKESKLLGNKKKEYLLTEEDISKIEVKQKFIERNLVDTRYSSRVVLNALQDFYKNHNFDTTISVVRGQFTSQLRRKWGLEKSRETYHHHAVDALIIAASSQLRLWKKQNNPLIAYKEGQFVDSQTGEIISLTDDEYKELVFKAPYDHFVDTLSSKTFEDSILFSYQVDSKFNRKISDATIYATRKAKLDKEKKEYTYTLGKIKDIYSLGTKTPSKTGFYKFLDLYNKDKSQFLMFQKDRKTWDEVIEKIMEQYRPFKEYDKAGKLVDFNPFEKYRQENGPIRKYSKKGNGPEIKSLKYYDILLGKHKNITPEGSRNTVALLSLNPWRTDVYYNMETKKYEFLGLKYADLPFEEGGAYGISTETYNELREKEGIGKNSEFKFTLYKNDLILIKDTETNCQQFFRFWSRTGKDNPKSFEKHKIELKPYEKAKFEKGEELEVLGKVPPSSNQFQKNMQIENLSIYKVKTDVLGNKHFIKKEGDKPKLKF

SEQ ID NO: 1280 - protein, 550 aa, Streptococcus oralis
MYSLDKNGSPTPLYRDQLNQYEVDHIIPYSFLPIDSIDNKVLTHRENNQRKLDNIPDKETVANMKPFWEKLYNAKLISQTKYQRLTTSERTPDGVLTESMKAGFIERQLVETRQIIKHVARILDNRFSDTKIITLKSQLVTNFRNTFHIAKIRELNDYHHAHDAYLAVVVGQTLLKAYPKLAPELIYGHHAHFNRHEENKATIRKYLYSNIMRFFNNPDSKVSKDIWDCNRDLPIIKDIIYNSQVNFVKRTMIKKGAFYNQNPVGKFNKQIAANNRYPLKTKVSSLDTSIYGGYGPMNSALSIIIIAERFNEKKCKIETVKEFHDIFIIDYKKFNNDPFQFLNDTSENGFLKKNNINRVLAFYRVPKYSLMQKIDGTRMLFESKSNLHKATQFKLTKTQNELFFHMRRLLTKSNLMDLKSESAIKESQNFILKHKEEFDNISNQLSAFSQKMLGDTTSLKNLIKGYNERKIKEINSSEETIKYFYDNFIKMFSFVKSGAPKDINDFFNNKYTVARMRPKPDKKLLNATLIHQSITGLYETRIDLSKLGED

SEQ ID NO: 1281 - protein, 1140 aa, Streptococcus parasanguinis
MNGLVLGLDIGIASVGVGILKKDIGEIIHTNSRLFSAATADSNIERRGHRGGKRLTRRKKHRSIRLHDLFEDFGLLTDFSKVSINLNPYQLRVQGLDNQLTNEELFIALKNIVKRRGISYLDDASEDGGTVSSDYGKAVEENRKLLAEQTPGQIQLDRFEKYGQVRGDFNVVENGEKRRLINVFTTSAYSKEAERILRKQQEFNKKITDEFIEDYLTILTGKRKYYHGPGNEKSRTDYGRYTTKKDPEGKYITLDNIFGILIGKCTFYPDEYRASKASYTAQEFNLLNDLNNLTVPTETKKLSEEQKKTIIKYAKTAKTLGASTLLKYIAKLIGASVDQIHGYRIDPNKKPEMHTFETYRKMQSLETISVEELPRKVLDELAHILTLNTEREGIEEAINATLKDTFSQDQVLELVQFRKNNSSLFSKGWHSFSLKLMMELIPELYETSEEQMTILTRLGKQKSKETSKRTKYIDEKELTEEIYNPVVAKSVRQAIKIINEATKKYGIFDNIVIEMARENNEEDAKKEYIKRQKANLDEKNAAMEKAAFQYNGKKELPDNVFHGHKELATKIRLWHQQGEKCLYTGKNIPISDLIQNQYKYEIDHILPLSLSFDDSLSNKVLVLATANQEKGQRTPFQALDSMDDAWSYREFKSYVKDSKLLGNKKKEYLLTEEDISKIEVKQKFIERNLVDTRYSSRVVLNALQDFYKEHQFDTTISVVRGQFTSQLRRKWGLEKSRETYHHHAVDALIIAASSQLRLWKKQNNPLISYTEGQFVDQVTGEIISLSDDEYKELVFKAPYDHFVDTLKSKKFEDSILFSYQVDSKYNRKISDATIYATRKAKLDKENKEYTYTLGKIKDIYALGTKSPSKTGFYKFLDLYNKDKSQFLMFQKDRKTWDEVIEKIIEQYRPFKEYDENGKEVDFNPFEKYRIENGPIRKYSKKGNGPEIKSLKYYDNLLGKFVDITPSESKNPVALLSLNPWRTDVYYNTETSKYEFLGLKYADLCFEKGGAYGISEVKYNKIREKEGIGKESEFKFTLYKNDLILIKDTETNCQQIFRFWSRTGKDNPKSFEKHKIELKPYEKARFEKGEELEVLGKVPPSSNQLQKNMQIENLSIYKVKTDVLGNKHFIKKEGEEPKLKF

SEQ ID NO: 1282 - protein, 1374 aa, Streptococcus pseudoporcinus
MKKRYSYSIGLDIGTNSVGWAVINEDYKVPAKKMTVFGNTDRKTIKKNLLGTVLFDSGETAQARRLKRTNRRRYTRRRYRLCQLQNIFATEMVKVDDTFFQRLSESFFYYQDKAFDKHPIFGNSKEERAYHKTYPTIYHLRKDLADRDQKADLRLIYLALSHIIKFRGHFLIEGKLNSENTDVQKLFIALVTVYNLLFEEEPIAGETCDAKALLTAKTSKSKRLESLISEFPGQKKNGLFGNLLALALGLRPNFKSNFGLSEDAKLQITKDTYEEELDNLLAEIGDHYADLFLAAKNLSDAILLSDILTLSDENTRAPLSASMIKRYEEHQEDLALLKKLVKEQMPEKYWEIFSNAKKNGYAGYIEGKVSQEDFYRYIKPILSRLKGGDEFLAKIDRDDFLRKQRTFDNGSIPHQIHLKELHAILRRQEKYYPFLAEQKEKIEQLLCFRIPYYVGPLAKGGNSSFAWLKRRSDEPITPWNFKDVVDEEASAQAFIEGMTNYDTYLPEEKVLPKHSPLYEMFTVYNELTKVKYIAENMTKPLYLSAEQKEAIIDHLFKQTRKVTVKDLKEKYFSQIEGLENVDVTGVEGAFNASLGTYNDLLKIIKDKAFLDDEANAEILEEIVLILTLFQDEKLIEKRLAKYANLFEKSVLKKLRKRHYRGWGRLSRQLIDGMKDKASGKTILDFLKADDFANRNFIQLINDSSLDFEKLIDDAQKKAIKRESLTEAVANLAGSPAIKKGILQSLKVVDEIVKVMGHNPDNIVIEMSRENQTTAQGLKNARQRLKKIKEVHKKTGSRILEDNSERITNLTLQDNRLYLYLLQDGKDMYTGQDLDINNLSQYDIDHIIPQSFIKDNSIDNLVLTTQKANRGKSDNVPSIEVVRDMKDRVWRRQLANGAISRQKFDHLTKAERGGLADSDKARFLRRQLVETRQITKHVAQLLDSRFNSKSNQNKKLARNVKIITLKSKIVSDFRKDFGLYKLREVNNYHHAHDAYLNAVVGTALLKKYPKLEAEFVYGDYKHFDLVKLISKSDPSLGKATAKVFFYSNIMNFFKEELSLADGTLMKRPVIETNTETGEVVWDKVKDFKTIRKVLSYPQVNIVKKTEIQSGAFSKESVLSKGNSDKLIERKKGWDPKKYGGFDSPNTAYSIFVVAKVAKRKAQKLKTVKEIVGITIMEQAEYEKDNIAFLEKKGYQDIQEKLLIKLPKYSLFELENGRRRLLASANEFQKGNELALSGKYMKFLYLASRYDKLSSKIESEQQKKLFVEQHLHYFDEILDIVVKHATCYIKAENNLKKIISLYKKKEAYSINEQALNMLNLFIFTSLGAPSTFVFFDETIDRKRYTTSSDVLNGILIQQSITGLYETRIDLSRFGGD

SEQ ID NO: 1283 - protein, 1052 aa, Streptococcus pyogenes
LSASMIKRYDEHHQDLTLLKALVRQQLPEKYKEIFFDQSKNGYAGYIDGGASQEEFYKFIKPILEKMDGTEELLAKLNREDLLRKQRTFDNGSIPHQIHLGELHAILRRQEDFYPFLKDNREKIEKILTFRIPYYVGPLARGNSRFAWMTRKSEETITPWNFEEVVDKGASAQSFIERMTNFDKNLPNEKVLPKHSLLYEYFTVYNELTKVKYVTEGMRKPAFLSGEQKKAIVDLLFKTNRKVTVKQLKEDYFKKIECFDSVEISGVEDRFNASLGTYHDLLKIIKDKDFLDNEENEDILEDIVLTLTLFEDREMIEERLKTYAHLFDDKVMKQLKRRRYTGWGRLSRKLINGIRDKQSGKTILDFLKSDGFANRNFMQLIHDDSLTFKEDLQKAQVSGQGDSLHEHIANLAGSPAIKKGILQTVKVVDELVKVMGRHKPENIVIEMARENQTTQKGQKNSRERMKRIEEGIKELGSDILKEYPVENTQLQNEKLYLYYLQNGRDMYVDQELDINRLSDYDVDHIVPQSFLKDDSIDNKVLTRSDKNRGKSDNVPSEEVVKKMKNYWKQLLNAKLITQRKFDNLTKAERGGLSELDKAGFIKRQLVETRQITKHVAQILDSRMNTKYDENDKLIREVRVITLKSKLVSDFRKDFQFYKVREINNYHHAHDAYLNAVVGTALIKKYPKLESEFVYGDYKVYDIRKMIAKSEQEIGKATAKYFFYSNIMNFFKTEITLANGEIRKRPLIETNGETGEIVWDKGRDFATVRKVLSMPQVNIVKKTEVQTGGFSKESILPKRNSDKLIARKKDWDPKKYGGFDSPTVAYSVLVVAKVEKGKSKKLKSVKELVGITIMERSSFEKDPVDFLEAKGYKEVRKDLIIKLPKYSLFELENGRKRMLASAGELQKGNELALPSKYVNFLYLASHYEKLKGSPEDNEQKQLFVEQHKHYLDEIIEQISEFSKRVILADANLDKVLSAYNKHRDKPIREQAENIIHLFTLTNLGAPAAFKCFDTTIGRNRYKSIKEVLDATLIHQSITGLYETRIDLSQLGGD

SEQ ID NO: 1284 - protein, 1368 aa, Streptococcus pyogenes; identical to SEQ ID NO: 37

SEQ ID NO: 1285 - protein, 1367 aa, Streptococcus pyogenes; identical to SEQ ID NO: 241

SEQ ID NO: 1286 - protein, 1368 aa, Streptococcus pyogenes [sequence omitted]

SEQ ID NO: 1287 - protein, 1370 aa, Streptococcus ratti
MKKPYSIGLDIGTNSVGWAVITDDYKVPAKKMKVLGNTDKNYIKKNLLGALLFDSGNTAEDRRLKRTARRRYTRRRNRLLYLQDIFSDEMNKVDESFFHRLEDSFLVSEDKRGDHHPIFGNVVDEVKYHEQFPTIYHLRKYLADTPEKADLRLVYLALAHMIKFRGHFLIDDPKLDVKNTDSQELFSQFLTAYDVTQEDSHLADVKINISDIITEKMNKSRKVEALLFHFPSQKKNSFFGNLVSLVFGLLPNFKTNFNLAEDAKLQLSKDSYDEDLENLLGQIGDEYTDVFVAARKLYDSILLSGILTVNDLSTKAILSASMVRRYEEHNKDLAKLKAFVKANFTHDVFKEVFSDASKNGYAGYIEGKTSQEDFYKYVKNLIGKVDGSADFIEKIDREDFLRKQRTFDNGSIPHQVHLAEMKAILRRQGEYYPFLKEHAEKIQQILTFRIPYYVGPLDRHGHSDFAWASFNSEEKVTPWNFEEIIDKNKSAQAFIERMTNQDLYLPNEKVLPKHSPLYEKYTVYNELTKIKYVTETGTAKFFDANLKQEIFDGLFKKERKVTKRKLLTFLEKNFDEFRIVDIQGLDKETETFNASYGIYQDLLKIIKDKAFMDDSENADILEDIVLTLTLFEDREMIKQRLAKYADLFDKKVIDNLARRRYTGWGRLSAKLLNGIRDKRSRKTIMDYLVDDGRSNRNLMQLITDDNLTFKDEIAKAQYSDNSDDLHQVVQDLAGSPAIKKGILQSVKIVDELVKVMGYEPEQIVVEMARENQTTAKGRRNSQQRYKRLEEAIKNLDRDLNYKILKEHPTDNQALQNDRLFLYYLQNGRDMYTGESLDINRLSDYDIDHIIPQAFIKDNSIDNRVLVSSAKNRGKSDDVPSEDVVNRMRPFWNKLLNCGLISQRKYSNLTKKELTPNDKAGFIKRQLVETRQITKHVARILDEHFNKEFDEDKKRIRKVKVVTLKSNLVSNFRKEFELYKVREINDYHHAHDAYLNAVVAKALLMKYPKLEPEFVYGEYPKYNSYRERKTATQRMFFYSNIMNMFKSKVKLADERIIERPMIEVNDETGEIAWDKTKHIATVKKVLSYPQINIVKKVEEQTGGLTNETIYPRGSFDKLLNRKNTLEASKYGGFGSPTVAYCVLVVADSKNENGKVKKLKLGSELLGITILEKNDFENNSLDFLSRKGYQGVQEKKIIKLPKYSLFEFQDGSRRMLSSVMANDNKRGDLQKANEMILPAYLVKLLYHAKHINSVGEPAHKNYINEHCSEFQDLLNYIRQFADKFVDVDKNLSKIRSLSKSMAEYSVSEICSSFVNLLTLTALGAPADFKFFGTTIPRKRYGSPQSILSATLIHQSITGLYETRIDLSKLGED

SEQ ID NO: 1288 - protein, 1135 aa, Streptococcus salivarius
MSDLVLGLDIGIGSVGVGILNKVTGEIIHKNSRIFPAAQAENNLERRTNRQGRRLTRRKKHRRVRLNHLFEESGLITDFTKVSINLNPYQLRVKGLTAELSNEELFIALKNMVKHRGISYLDDASDDGNSSVGDYAQIVKENSKQLETKTPGQIQLERYQKYGQLRGDFTVEEDGRKHRLINVFPTSAYHAEALRILQTQQEFNPQITDEFINSYLEILTGKRKYYHGPGNEKSRTDYGKYTTKKDAQGQYITLNNIFGILIGKCTFYPEEYRAAKASYTAQEFNLLNDLNNLTVPTETKKLSEEQKYQIITYVKNEKAMGPAKLFKYIAKLLACDIADIKGYRIDKSDKAEIHTFEAYRKMKTLETIDIEQIEREKLDKLAYVLTLNTEREGIQEALDHEFADGTFSQEQVDELVQFRKANSSIFGKGWHSFSVKLMMELIPELYATSEEQMTILTRLGKQKTTSSSNKTKYIDEKQLTEEIYNPVVAKSVRQAIKIVNAAIKKYGDFDNIVIEMARETNEDDEKKAIQKIQKANKAEKDAAMRKAANQYNGKAELPHSVFHGHKQLATKIRLWHQQGERCLYTGKTISIHDLINNPNQFEIDHILPLSITFDDSLANKVLVYATANQEKGQRTPYQALDSMDDAWSFRELKAFVRESKALSNKKKEYLLTEEDISKFDVRKKFIERNLVDTRYASRVVLNALQEHFKAHKIDTKVSVVRGQFTSQLRRHWGIDKTRDTYHHHAVDALIIAASSQLNLWKKQKNTLVSYSEDQLLDIETGELISDDEYKESVFKAPYQHFVDTLKSKEFEDSILFSYQVDSKFNRKISDATIYATRQAKVGKDKKDETYVLGKIKDIYALGTKTPSKTGFYKFLDLYNKDKSQFLVYQKDRKTWDEVIEKIMEQYRPFKESDKNGKEVDFNPFEKYRIENGPIRKYSRKGNGPEIKSLKYYASKLGNHIDITPKDSNNKVVLQSVSPWRADVYFNKTTGSYEILGLKYADLQFEKGTGTYRISEEKYNDIKKKEGVDSDSEFKFTLYKNDLLLIKDTETKEQRLFRFLSRSMPNKKHYVELKPYSKDKFEKNESLIEILGSADKSGRCIKGLAKSNLSIFKVRTDVLGNQHIIKNEGDKPKLDF

SEQ ID NO: 1289 - protein, 1127 aa, Streptococcus salivarius
MSDLVLGLDIGIGSVGVGILNKVTGEIIHKNSRIFPAAQAENNVERRINRQGRRLTRRKKHRRVRLNHLFEESGLITDFTNVSINLNPYQLRVKGLTDELSNEELFIALKNMVKHRGISYLDDASDDGNSSVGDYAQIVKENSKQLETKTPGQIQLERYQKYGQLRGDFTVEEDGKKHRLINVFPTSAYRAEALRILQTQQEFNPQITDEFINSYLQILTGKRKYYHGPGNEKSRTDYGRYTTKKDSEDEYITLDNIFGILIGKCTFYPEEYRAAKASYTAQEFNLLNDLNNLTVPTETKKLSEEQKNQIITNVKNEKAMGPAKLFKYIAKLLSCDVADIKGYRIDKSDKAEIHTFEAYRKMKTLATIDIEQMERENLDKLAYVLTLNTEKEGIQEALEHEFADGTFSQEQIDELVQFRKANSSIFGKGWHSFSVKLMMELIPELYATSEEQMTILTRLGKQKTTSSSNKTKYIDEKQLTEEIYNPVAAKSVRQAIKIVNAAIKEYGDFDNIVIEMARETNEDDEKKAIQKIQKANKDEKDAAMLKAANQYNGKAELPHSVFHGHKQLATKIRLWHQQGERCLYTGKTISIHDLINNSNQFEIDHILPLSITFDDSLANKVLVYATANQEKGQRTPYQALDSMDDAWSFRELKAFVRDSKALSNKKKEYLLTEEDISKFDVRKKFIERNLVDTRYASRVVLNALQEHFRVHKTDTKVSVVRGQFTSQLRRHWGIEKTRDTYHHHAVDALIIAASSQLNLWKKQKNTLVSYSEDQLLDIETGELISDDEYKESVFKAPYQHFVDTLKSKEFEDSILFSYQVDSKFNRKISDATIYATRQAKVGKDKKDETYVLGKIKDIYSQTGYDAFIKIYKKDKSKFLMYRHDPQTFEKVIEPILENYPNKELNEKGKEVPCNPFLKYKEDHGYIRKYSKKGNGPEIKSLKYYDSKLGNHIDITPKNSNNKVVLQSVSPWRADVYFNKTTGKYEILGLKYADLKFEKGTGTYKISEEKYNDIKIKEGVDSDSEFKFTLYKNDLLLIKDTETKEQQLFRFLSRTMPNVKHYVELKPYDKQKFDDNEELIKILGIVAKGGQCKKGVSKPNISIYKIRTDVLGNQHIIKNEGDKPKLDF

SEQ ID NO: 1290 - protein, 1385 aa, Streptococcus salivarius
MTKPYSIGLDIGTNSVGWAVITDDYKVPSKKMKVLGNTSKKYIKKNLLGALLFDSGITAEGRRLKRTARRRYTRRRNRILYLQEIFSTEMATLDDAFFQRLDDSFLVPDDKRDSKYPIFGNLVEEKVYHDEFPTIYHLRKHLADSSKKADLRLVYLALAHMIKYRGHFLIEGDFNSKNNDLQKNFQDFLDTYNAIFESDLSLENSKQLEEIVKDKISKSAKKDRILKLFPGEKNSGIFSEFLKLIVGNQADFRKYFNLDEKTSLQFSKESYDEDLETLLGHIGDDYSDVFLKAKKLYDAILLSGILTVTDNGTEAPLSSAMIMRYKEHEEDLALLKAYIRNISLETYNEVFKDNTKNGYAGYIDGKTSQEDFYVYLKRLLAGLEGADYFLEKIDREDFLRKQRTFDNGSIPYQIYLQEMRAILDKQAKFYPFLAKNKERIEKILTFRIPYYVGPLARGNSDFAWSIRKRNEKITPWNFEDVIDKESSAEAFINRMTSFDLYLPEEKVLPKHSLLYENFTVYNELTKVRFIAEGMRDYQFLDSKQKKDIVRLYFKGKRKVTDKDIIEYLHAIDGYDGIELKGIEKQFNSSLSTYHDLLNIINDKEFLDDSSNETIIEEIIHTLTMFEDREMIKQRLSKFDNIFDKSVLKKLSRRHYTGWGKLSAKLINGIRDEKSGNTILDYLIDDGVSNRNFMQLIHDDALSFKKKIKKAQIIGDKDNIKQVVKSLPGSPAIKKGILQSIKIVDELVKVMGREPESIVVEMARENQYTNQGKSNSQQRLKRLEESLKGLGSKILKENVPTRLSKIDNNALQNDRLYLYYLQNGKDMYTGEELDIDRLSNYDIDHIIPQAFLKDDSIDNKVLVSSASNRGKSDDVPSLEVVKKRKTLWYQLLKSKLISQRKFDNLTKAERGGLSQEEKAGFIQRQLVETRQITKHVARLLDERFNNKKDENNRTLRTVKIITLKSSLVSQFRKDFELYKVREINDFHHAHDAYLNAVVASALLKKYPKLEPEFVYGDYPKYNSFRERKSATEKVYFYSNIMNIFKKSIPLADGTVIDRPLIEVNEETGESVWNKVADLNTVRKVLSYSQVNIVKKVEEQNHGLDRGKPKGLFNANLSSKPKPNSKENLVGAKEYLDPKKYGGYAGISNSFAILVKGTIEKGAKKKITNVLEFQGISILDRIYYRKDKLNFLLEKGYKDIELIIELPKYSLFELSDGSRRMLASILSTNNKRGEIHKGNQIFISQKFVKLLYHAKRISSTFNENHRKYVENHKKEFEELFYYILEFNENYVGAKKNGELLKSAFQSWQNHSIDELCSSFIGPTGSERKGLFELTSRGGAADFEFLGVKIPRYRDYTPSSLLKDATLIHQSVTGLYETRIDLGKLGED

SEQ ID NO: 1291 - protein, 1392 aa, Streptococcus sanguinis
MENKNYSIGLDIGTNSVGWAVITDDYKVPSKKMKVFGNTDKHFIKKNLIGALLFDEGATAEDRRLKRTARRRYTRRKNRLRYLQEIFSEEISKLDSSFFHRLDDSFLVPKDKRGSKYPIFATLEEEKEYHKKFPTIYHLRKHLADSKEKTDLRLIYLALAHMIKYRGHFLYEESFDIKNNDIQKIFNEFISIYDNTFEGSSLSGQNAQVEAIFTDKISKSAKRERVLKLFSDEKSTSLFSEFLKLIVGNQADFKKHFDLEEKAPLQFSKDTYDEDLENLLGQIGDGFTDLFLVAKKLYDAILLSGILTVTDPSTKAPLSASMIERYESHQKDLAALKQFIKNNLPKRYNEVFSDQSKDGYAGYIDGKTTQEAFYKYIKNLLSKFEGADYFLDKIEREDFLRKQRTFDNGSIPHQIHLQEMNAILRRQGEHYPFLKENREKIEKILTFRIPYYVGPLARGNRDFAWLTRNSDQAIRPWNFEEIVDKASSAEEFINKMTNYDLYLPEEKVLPKHSLLYETFAVYNELTKVKFIAEGLRDYQFLDSGQKKQIVNQLFKEKRKVTEKDIIHYLHNVDGYDGIELKGIEKQFNASLSTYHDLLKIIKDKEFMDDPKNEEILENIVHTLTIFEDREMIKQRLAQYDSIFDEKVIKALTRRHYTGWGKLSAKLINGICDKQTGDTILDYLIDDGKINRNFMQLINDDGLSFKEIIQKAQVVGKTDDVKQVVQELPGSPAIKKGILQSIKIVDELVKVMGYAPESIVIEMARENQTTARGKKNSQQRYKRIEDSLKNLAPGLDSNILKENPTDNIQLQNDRLFLYYLQNGKDMYTGKPLDIDQLSSYDIDHIIPQAFIKDDSIDNRVLTSSKDNRGKSDNVPSLEVVQKRKAFWQQLLDSKLISERKFNNLTKAERGGLDERDKVGFIRRQLVETRQITKHVAQILDASFNTEVNEKNQKIRTVKIITLKSNLVSNFRKEFELYKVREINDYHHAHDAYLNAVVAKAILKKYPKLEPEFVYGDYQKYDLKRYISRFKPSKEIEKATEKYFFYSNLLNFFKEEVHYADGIIVKRENIEYSKDTGEIAWNKEKDFATIKKVLSYPQVNIVKKTEIQTHGLDRGKPKGLFNSNPSPKPSEDSKENLVPIKQGLDPRKYGGYAGISNSYAVLVKAIVEKGAKKQQKTILEFQGISILDKINFENNKENYLLKKRYIEILSTITLPKYSLFEFPDGTRRRLASILSTNNKRGEIHKGNELVLPGKYTTLLYHAKNINKKLEPEHLEYVEKHRNDFAKLLECVLNFNDKYVGALKNGERIRQAFTDWETVDIEKLCFSFIGPENSKNAGLFELTSQGSASDFEFLGVKIPRYRDYAPSSLLKATLIHQSITGLYETRIDLSKLGED

SEQ ID NO: 1292 - protein, 1377 aa, Streptococcus sanguinis
MKKPYSIGLDIGTNSVGWAVITDDYKVPSKKMKVLGNTDKHFIKKNLIGALLFDEGTTAEDRRLKRTSRRRYTRRKNRLRYLQEIFSEEISKLDSSFFHRLDDSFLVPEDKRGSKYPIFATLEEEKEYHKKFPTIYHLRKHLADSKEKTDLRLIYLALAHMIKYRGHFLYEESFDIKNNDIQKIFNEFISIYDNTFEGSSLSGQNAQVEAIFTDKISKSTKRERVLKLFSDEKSTGLFSEFLKLIVGNQADFKKHFDLEEKAPLQFSKDTYDEDLENLLGQIGDGFADLFLVAKKLYDAILLSGILTVTDPSTKAPLSASMIERYENHQEDLAALKQFIKNNLSEKYAEVFSDQSKDGYAGFIDGKTTQEAFYKYIKNLLSKLEGADYFLNKIEREDFLRKQRTFDNGSIPHQIHLQEMNAILRRQGEHYLFLKENREKIEKILAFRIPYYVGPLARGNRDFAWLTRNSDQAIRPWNFEEVVDKASSAEDFINKMTNYDLYLPEEKVLPKHSLLYETFAVYNELTKVKFIAEGLRDYQFLDSGQKKQIVNQLFKDKRKVTEKDIIHYLHNVDGYDGIELKGIEKQFNASLSTYHDLLKIIKDKEFMDNPKNGEILENIIHTLTIFEDREMIKQRLAQYDTLFDEKVIKALTRRHYTGWGKLSAKLINGIRDKQTGKTILEYLIDDGDCNRNFMQLINDDGLSFKEIIQKAQVVGKTDDVKQVVQEIPGSPAIKKGILQSIKIVDELVKVMGHNPESIVIEMARENQTTAKGKKNSQQRYKRIEDALKNLAPGLDSNILKENPTDNIQLQNDRLFLYYLQNGKDMYTGKAIDINQLSNYDIDHIIPQAFIKDDSLDNRVLTSSKDNRGKSDNVPSIEVVQKRKAFWQQLLDSKLISERKFNNLTKAKRGGLDERDKVGFIKRQLVETRQITKHVAQLLDTRFNTEVNEENQKIRTVKIITLKSNLVSNFRKEFGLYKVREINDYHHAHDAYLNAVVAKAILKKYPKLEPEFVYGDYQKYDLKRYILKSKASNTIDKATEKYFFYSNLLNFFKEKVRYADGTIKKRENIEYSNDTGEIAWNKEKDFATIKKVLSLPQVNIVKKTEEQTVGQNGGLFDNNIVSKKKVVDASKLIPIKSSLSPEKYGGYARPTIAYSVLVIADIEKGKGKAKKLKRIKEIVGITIQDKKKFESNPVTYLEECGYKNINSNLIIKLPKYSLFEFNDGQRRLLASSIELQKGNELILPYHLTALLYHAQRINKISEPIHKQYVEAHQNEFKELLTTIISLSKKYIQKPNVELLLQQAFDQADKDIYQLSESFISLLKLTSFGAPGAFKFLGVEISQSSVRYKPNSQFLDTTLIHQSITGLYETRIDLSKLGED

SEQ ID NO: 1293 - protein, 1370 aa, Streptococcus sanguinis
MKKPYSIGLDIGTNSVGWAVVTDDYKVPAKKMRVFGDTDRSHIKKNLLGTLLFDDGNTAESRRLKRTARRRYTRRRNRILYLQEIFTESMNEIDESFFHRLDDSFLVPEDKRGSKYPIFATLQEEKEYHKQFPTIYHLRKQLADSKEKSDVRLIYLALAHMIKYRGHFLYEETFDIKNNDIQKIFNEFINIYDNTFEGSSLSGQNAQVEAIFTDKISKSAKRERVLKLFPDEKSTGLFSEFLKLIVGNQADFKKHFDLEEKAPLQFSKDTYDEELENLLGQIGDDFADLFLIAKKLYDAILLSGILTVTDPSTKAPLSASMIERYENHQKDLAALKQFIKNNLPEKYVEVFSDQSKDGYAGYIDGKTTQEAFYKYIKNLLSKFEGADYFLDKIEREDFLRKQRTFDNGSIPHQIHLQEMNAILRRQGEHYPFLKENREKIEKILTFRIPYYVGPLARDNRDFSWLTRNSDEPIRPWNFEEVVDKARSAEDFIHRMTNYDLYLPEEKVLPKHSLLYETFAVYNELTKVKFIAEGLRDYQFLDSGQKKQIVNQLFKEKRKVTEKDIIHYLHNVDGYDGIELKGIEKQFNANLSTYHDLLKITKDKEFMDDPKNEEILENIVHTLTIFEDREMIKQRLAQYDTLFDEKVIKALTRRHYTGWGKLSAKLINGIRDKQSGKTILDYLIDDDKINRNFMQLINDDGLSFKEIIQKAQVVGKTDDVKQVVQELPGSPAIKKGILQSIKIVDELVKVMGYALESIVIEMARENQTTARGKKNSQQRYKRIEDALKNLAPGLDSNILKENPTDNIQLKNDRLFLYYLQNGKDMYTGKPLDINQLSSYDIDHIIPQAFIKDDSIDNRVLTSSKDNRGKSDNVPSLEVVQKRKAFWQQLLDSKLISERKFNNLTKAERGGLDERDKVGFIRRQLVETQQITKNVAQILDARFNTEVKEKNQKIRTVKIITLKSNLVSNFRKEFGLYKVREINNYHHAHDAYLNAVVAKAILKKYPKLEPEFVYGDYQKYDLKKYISRFKPSKEIEKATEKYFFYSNLLNFFKEEVLYADGTIRKRENIEYSKDTGEIAWDKEKDFATIKKVLSYPQVNIVKKREVQTGGFSKESILPKGNSDKLIPRKTKDILWDTTKYGGFDSPVIAYSILLIADIEKGKAKKLKTVKTLVGITIMEKAAFEENPITFLENKGYHNVRKENILCLPKYSLFELENGRRRLLASAKELQKGNEIVLPVCLTTLLYHSKNLHKLDEPEHLEYIQKHRNEFKDLLNLVSEFSQKYILAEANLEKIKDLYADNEQADIEILANSFINLLTFTALGAPAAFKFFGKDVDRKRYTTVSEILNATLIHQSITGLYETRIDLSKLGEE

SEQ ID NO: 1294 - protein, 1421 aa, Streptococcus sanguinis
MTKFNKNYSIGLDIGVSSVGYAVVTEDYRVPAFKFKVLGNTEKEKIKKNLIGSTTFVSAQPAKGTRVFRVNRRRIDRRNHRITYLRDIFQKEIEKVDKNFYRRLDESFRVLGDKSEDLQIKQPFFGDKELETAYHKKYPTIYHLRKHLADADKNSPVADIREVYMAISHILKYRGHFLTLDKINPNNINMQNSWIDFIESCQEVFDLEISDESKNIADIFKSSENRQEKVKKILPYFQQELLKKDKSIFKQLLQLLFGLKTKFKDCFELEEEPDLNFSKENYDENLENFLGSLEEDFSDVFAKLKVLRDTILLSGMLTYTGATHARFSATMVERYEEHRKDLQRFKFFIKQNLSEQDYLDIFGRKTQNGFDVDKETKGYVGYITNKMVLTNPQKQKTIQQNFYDYISGKITGIEGAEYFLNKISDGTFLRKLRTSDNGAIPNQIHAYELEKIIERQGKDYPFLLENKDKLLSILTFKIPYYVGPLAKGSNSRFAWIKRATSSDILDDNDEDTRNGKIRPWNYQKLINMDETRDAFITNLIGNDIILLNEKVLPKRSLIYEEVMLQNELTRVKYKDKYGKAHFFDSELRQNIINGLFKNNSKRVNAKSLIKYLSDNHKDLNAIEIVSGVEKGKSFNSTLKTYNDLKTIFSEELLDSEIYQKELEEIIKVITVFDDKKSIKNYLTKFFGHLEILDEEKINQLSKLRYSGWGRYSAKLLLDIRDEDTGFNLLQFLRNDEENRNLTKLISDNTLSFEPKIKDIQSKSTIEDDIFDEIKKLAGSPAIKRGILNSIKIVDELVQIIGYPPHNIVIEMARENMTTEEGQKKAKTRKTKLESALKNIENSLLENGKVPHSDEQLQSEKLYLYYLQNGKDMYTLDKTGSPAPLYLDQLDQYEVDHIIPYSFLPIDSIDNKVLTHRENNQQKLNNIPDKETVANMKPFWEKLYNAKLISQTKYQRLTTSERTPDGVLTESMKAGFIERQLVETRQIIKHVARILDNRFSDTKIITLKSQLITNFRNTFHIAKIRELNDYHHAHDAYLAVVVGQTLLKVYPKLAPELIYGHHAHFNRHEENKATLRKHLYSNIMRFFNNPDSKVSKDIWDCNRDLPIIKDVIYNSQINFVKRTMIKKGAFYNQNPVGKFNKQLAANNRYPLKTKALCLDTSIYGGYGPMNSALSIIIIAERFNEKKGKIETVKEFHDIFIIDYEKFNNNPFQFLNDTSENGFLKKNNINRVLGFYRIPKYSLMQKIDGTRMLFESKSNLHKATQFKLTKTQNELFFHMKRLLTKSNLMDLKSKSAIKESQNFILKHKEEFDNISNQLSAFSQKMLGNTTSLKNLIKGYNERKIKEIDIRDETIKYFYDNFIKMFSFVKSGAPKDINDFFDNKCTVARMRPKPDKKLLNATLIHQSITGLYETRIDLSKLGED

SEQ ID NO: 1295 - protein, 317 aa, Unknown
  Streptococcus sp. GMD4S
FEDSILFSYQVDSKFNRKISDATIYATRKAKLDKEKSEETYVLGKIKDIYSQAGYDAFIKIYNKDKSKFLMYHKDPQTFEKVIEEILRTYPSKELNDKNKEIPCNPFEKYRQENGPIRKYSKKSNGPEIKSLKYYDNKLGNHIDITPESSDNQVVLQSLKPWRTDVYFNHQTKKYELMGLKYSDLSFEKGSGKYSISNQKYNSIKRIEGIDEQSEFKFTLYKNDLILIKDSENNEQKLFRFNSRNDTAKHYIELKPYDKAKFDGEQELITILGNVAKGGRCLKGLNKSNISIFKVKTDVLGKKHIIKKEGDEPKLKF

SEQ ID NO: 1296 - protein, 1420 aa, Unknown
  Streptococcus sp. oral taxon 071 str. 73H25AP
MAKFNKNYSIGLDIGVSSVGYAVVTEDYRVPAFKFKVLGNTEKEKIKKNLIGSTTFVPAQSAQGTRVFRVNRRRIDRRNHRIAYLRDIFQKEIEKIDKNFYRRLDESFRVLGDKSEDIQIKQPFFGNKELETAYHKKYPTIYHLRKHLADADKNSPVADIREVYMVLSHILKYRGHFLTLGKIDPNNINMQNSWIDFIESCQDAFDLEISDESKTIAAIFKSSENRQEKVKQILSYFQQELLKKDKSIFKQLLQLLFGLKTKFKDCFELEEEPDLNFSKENYDENLENLLGALEEDFSDVFAKLKILRDTILLSSMLTYTGATHARFSATMVERYEEHRKDLQRFKSFVKQNLSEQDYLDIFGRKTPTGFDVDKETKGYVGYISNKMVLTNPQKQKTIQQNFYDYISGKITGIEGAECFLNKISDGTFLRKLRTTDNGAIPNQIHAYELEKIIERQGRDYPFLLENKDKLLSILTFKIPYYVGPLAKGNNSRFAWIKRTTSQDVLDDNDEDTRNGKIRPWNYHKLINMDETRDAFIINLIGNDIILLNEKVLPKRSLIYEEVMLQNELTRVKYKDKYGKIHFFNSELRQEIINNLFKTNSKRVSSAMLLSYLENFTNLQAVEIVSGIEKGKSLNSTLKTYNDLKTIFSEELLDSEIYQKELEEIIKVITVFDDKKSIKNYLTKYFGHLEFLNEEKINQLSKLRYTGWGRYSGKLLLGIRDEDTGFNLMQFLRNDDENRNLTQLISDTTLSFDSAIKAIQSKSTVEDDVFEEIKNLAGSPAIKRGILNSIKIVDELVQIIGYPPQNIIIEMARENMTTEEGQKKAKTRKSKLESALKNIEDSVLESGKVPHSDEQLQSEKLYLYYLQNGKDMYSLDKTGSPTPLYRDQLDQYEVDHIIPYSFLPIDSIDNKVLTHRENNQRKLNNIPDKETVANMKPFWEKLYNAKLISQTKYQRLTTSERTPDGVLTESMKAGFIERQLVETRQIIKHVARILDNRFSDTKIITLKSQLVTNFRNTFHIAKIRELNDYHHAHDAYLAVVVGQTLLKAYPKLAPELIYGHHAHFNRHEENKATLRKHLYSNIMRFFNNPDSKVSKDIWDCNRDLPIVKDVIYNSQINFVKRTMIKKGAFYNQNPVGKLNKQIAANNRYPLKTKVSSLDTSIYGGYGPMNSALSIIIIAERFNEKKGKIETVKEFHDIFIIDYEKFNNNPFQFLNNVSEEGFLKKNDLNRVLAFYRISKYSLMQKIDGTRMLFESKSNLHKVTQFKLTKTQNELFFHMKRLLTKSNLMDLKSESAIKESQNFIQTHQNEFDNIADRLSNYSQKMLGETKSLQTLINGYNERPIKQIDNNEETIRYYYDNFIKMFSFVKSGAPKDIINFFNDKYTVPRMRPKPDRKMLDATLIHQSITGLYETRIDLSKLGED

SEQ ID NO: 1297 - protein, 1371 aa, Unknown
  Streptococcus sp. F0441
MENKNYSIGLDIGTNSVGWSVITDDYKVPSKKMKVLGNTDKHFIKKNLIGALLFDEGTTAEARRLKRTARRRYTRRKNRLRYLQEIFSEEIGKVDSSFFHRLDDSFLIPEDKRGSKYPIFATLAEEKKYHKQFPTIYHLRKQLADSKEKTDLRLIYLALAHMIKYRGHFLYEEAFDIKNNDIQKIFNEFISIYNNTFEGNSLSGQNVQVEAIFTDKISKSAKRERVLKLFPDEKSTGLFSEFLKLIVGNQADFKKHFDLEEKAPLQFSRDTYDEDLENLLGQIGDDFADLFLVAKKLYDAILLSGILTVTNPSTKAPLSASMIERYENHQKDLASLKQFIKNNLPEKYDEVFSDQSEDGYAGYIDGKTTQETFYKYIKNLLSKFEGADYFLDKIEREDFLRKQRTFDNGSIPHQIHLQEMNAILRRQGEHYPFLKENKEKIEKILTFRIPYYVGPLARGNRDFAWLTRNSDQAIRPWNFEEIVDKASSAEDFINKMTNYDLYLPEEKVLPKHSLLYETFAVYNELTKVKFIAEGLRDYQFLDSGQKKQIVTQLFKEKRKVTEKDIIQFLHNVDGYDGIELKGIEKQFNASLSTYHDLLKIIKDKAFMDDAKNEAILENIVHTLTIFEDREMIKQRLAQYDSLFDEKVIKALTRRHYTGWGKLSAKLINGISDKQTGNTILDYLIDDGEINRNFMQLINDDGLSFKEIIQKAQVVGKTNDVKQVVQELPGSPAIKKGILQSIKIVDELVKVMGHAPESIVIEMARENQTTARGKKNSQQRYKRIEDSLKILASGLNSKILKEHPTDNIQLQNDRLFLYYLQNGKDMYTGEALDINQLSSCDIDHIIPQAFIKDDSLDNRVLTSSKDNRGKSDNVPSLEVVDKMKVFWQQLLDSKLISYRKFNNLTKAERGGLNELDKVGFIKRQLVETRQITKHVAQILDARFNKEVTEKDKKNRTVKIITLKSNLVSNFRKEFELYKVREINDYHHAHDAYLNAVVAKAILKKYPKLEPEFVYGDYQKYDLKRYISRSKDPKEIEKATEKYFFYSNLLNFFKEEVHYADGTIVKRENIEYSKDTGEIAWNKEKDFATIKKVLSLPQVNIVKKREVQTGGFSKESILPKGNSDKLIPRKTKDILWDTTKYGGFDSPVIAYSILLIADIEKGKAKKLKTVKTLVGITIMEKDAFEKNPIAFLENKGYHNVCKENILCLPKYSLFELENGRRRLLASAKELQKCNEIVLPVYLTTLLYHSKNVHKLDEPGHLEYIQKHRNEFKDLLNLVSEFSQKYVLADANLEKIKNLYADNEQADIEILANSFINLLTFTALGAPAAFKFFGKDVDRKRYTTVSEILNATLIHQSITGLYETRIDLSKLGED

SEQ ID NO: 1298 - protein, 93 aa, Unknown
  Streptococcus sp. BS35b
MILIKDSENNEQKLFRFNSRNDTAKHYVELKPYDKARFDGQQELITILGNVAKGGQCLKGLNKSNISIFKVKTDVLGKKHIIKKEGDEPKLKF

SEQ ID NO: 1299 - protein, 1121 aa, Unknown
  Streptococcus sp. GMD6S
MNGLVLGLDIGIASVGVGILEKNSGKIIHANSRLFPAATADNNVERRKNRQARRLHRRKKHRGVRFQDLFEDYGLLTDFSKVSINLNPYRLRVDGLNQQLTNEELFIALKNIVKRRGISYLDDASEDGGTVSSDYGKAVEENRKLLAEQTPGQIQLERFEKYGQVRGDFTVVENGEKRRLINVFSTSAYRKEAERILRKQQEFNSKITDEFIEDCLKILTGKRKYYHGPGNEKSRTDYGRFRTDGTTLDNIFGILIGKCTFYPDEYRASKASYTAQEFNLLNDLNNLTVPTETKKLSEEQKKVIVEYAKEAKTLGASTLLKYIAKMIDASVDQIRGYRVDVNNKPEIHTFEAYRKMQSLETISVGELSRNVLDELAHILTLNTEREGIEEAINTKLKDSFSQDQVLELVQFRKNNSSLFSKGWHNFSLKLMMELIPELYETSEEQMTILTRLGKQKSKEISKRTKYIDEKELTEEIYNPVVAKSVRQAIKIINEATKKHGIFDNIVIEMARENNEEDAKKDYIKRQKANQDEKNAAMEKAAFQYNGKKELPDSIFHGQKELATKIRLWHQQGEKCLYTGKNIPISDLIHNQYKYEIDHILPLSLSFDDSLSNKVLVLATANQEKGQRTPFQALDSMDDAWSYREFKSYVKESKLLGNKKKEYLLTEEDISKIEVKQKFIERNLIDTRYSSRVVLNALQDFYKAHKFDTTISVVRGQFTSQLRRKWGLEKSRETYHHHAVDALIIAASSQLRLWKKQNNPLIAYKEGQFVDSETGEIISLSDDEYKELVFKAPYDHFVDTLSSKTFEDSILFSYQVDSKFNRKISDATIYATRKAKLDKEKSEETYVLGKIKDIYSQAGYDAFIKIYNKDKSKFLMYHKDPQTFEKVIEEILRTYPSKELNDKNKEIPCNPFEKYRQENGPIRKYSKKSNGPEIKSLKYYDNKLGNHIDITPESSDNQVVLQSLKPWRTDVYFNHQTKKYELMGLKYSDLSFEKGSGKYSISNQKYNSIKRIEGIDEQSEFKFTLYKNDLILIKDSENNEQKLFRFNSRNDTAKHYIELKPYDKAKFDGEQELITILGNVAKGGRCLKGLNKSNISIFKVKTDVLGKKHIIKKEGDEPKLKF

SEQ ID NO: 1300 - protein, 1026 aa, Unknown
  Streptococcus sp. BS35b
MNGLVLGLDIGIASVGVGILEKNSGKIIHANSRLFPAATADNNVERRKNRQARRLNRRKKHRGVRFQDLFEDYGLLTDFSKVSINLNPYRLRVDGLNQQLTNEELFIALKNIVKRRGISYLDDASEDGGAVSSDYGKAVEENRKLLAEQTPGQIQLERFEKYGQVRGDFTVVENGEKRRLINVFSTSAYRKEAEKILRKQQEFNNQITDEFIEDYLKILTGKRKYYHGPGNEKSRTDYGRFRTDGTTLDNIFGVLIGKCTFYPNEYRASKSSYTAQEFNLLNDLNNLTVPTETKKLSEEQKKVIVEYAKEAKTLGASTLLKYIVKMIDASVDQISGYRVDVNNKPEMHTFEVYRKMQSLETISVGELSRNVLDELAHILTLNTEREGIEEAINSKLMGVFSQDQVLELVQFRKNNSSLFSKGWHNFSLKLMMELIPELYETSEEQMTILTRLGKQKSKETSKRTKYIDEKELTEEIYNPVVAKSVRQAIKIINEATKKHGIFDNIVIEMARENNEEDAKKDYIKRQKANQDEKNAAMEKAAFQYNGKKELPGNIFNGHKELATKIRLWHQQGEKCLYTGKTIPISDLIHNQYKYEIDHILPLSLSFDDSLSNKVLVHATANQEKGQRTPFQALDSMDDAWSYREFKSYVKDLKSLSNKKKDYLLTEEDISKIEVKQKFIERNLVDTRYSSRVVLNALQDFYKSHQFDTTISVVRGQFTSQLRRKWGLEKSRETYHHHAVDALIIAASSQLRLWKKQNNPLITYKEGQFIDSQTGEIISLTDDEYKELVFKAPYDHFVDTLHSKTFEDGILFSYQVDSKYNRKISDATIYATRKAKLDKDKSEETYVLGKIKDIYSQAGYDAFIKIYNKDKRKFLMYHKDPQTFEKVIEEILRTYPSKERNDKNKEVPCNPFEKYRQENGPIRKYSKKGNGPEIKCLKYYDNKLGNYIDISPDGSDNQVVLQSLKPWRTDVYFNHQTKKYELMGLKYSDLSFEKGSGKYSISNEKYNSIKRIEGVNEQSEFKFTLYK

SEQ ID NO: 1301 - protein, 1377 aa, Unknown
  Streptococcus sp. C300
MNNKPYSIGLDIGTNSVGWSVITDDYKVPSKKMKVLGNTDKRFIKKNLIGALLFDEGTTAEARRLKRTARRRYTRRKNRLRYLQEIFAEEMSKVDSSFFHRLDDSFLIPEDKRGSKYPIFATLVEEKEYHKQFPTIYHLRKQLADSKEKADLRLIYLVLAHMIKYRGHFLYEEAFDIKNNDIQKIFNEFISIYDNTFEGSSLSGQNAQVETIFTDKISKSAKRERVLKLFPDEKSTGLFSEFLKLIVGNQADFKKHFDLEEKAPLQFSKDTYDEDLENLLEQIGDDFADLFVAAKKLYDAILLSGILTVTDPSTKAPLSASMIERYENHQKDLAVLKQFIKTNLPEKYVEVFSDQSKDGYAGYIDGKTTQEAFYKYIKNLLSKFDGADYFLDKIEREVFLRKQRTFDNGSIPHQIHLQEMNTILRRQGEHYPFLKENKEKIEKILTFRIPYHVGPLARGNRDFAWLTRNSDQAIRPWNFEEIVDKASSAEDFINKMTNYDLYLPEEKVLPKHSLLYETFAVYNELTKVKFIAEGMRDYQFLDSGQKKKIINQLFKKKRKVTEDDIIDCLQKIDNYDGIELKGIEKQFNASLSTYHDILKIIRDKEFMDDPKNGDILENVIHTLTIFEDREMIKQRLAQYNSIFDEKVIKALSRKHYTGWGKLSAKLIDGIRDKQTGKTILDYLMDDGKSNRNFMQLIKDDELSFTEIIQKAQVVGDTDNLRQVVQNLPGSPAIKKGILQSIKIVDELVKVMGHAPESIVIEMARENQTTARGKKNSQQRYKRIEDSLKNLASGLDSNILKENPTDNIQLQNDRLFLYYLQNGKDMYTGEALNINQLSSYDIDHIIPQAFIKDDSLDNRVLTSSKDNRGKSDNVPSLEVVEKMKAFWQQLLDSKLISERKYNNLTKAERERGGLNELDKVGFIKRQLVETRQITKHVAQILDARFNKEVTEKNKKNRNVKIITLKSNMVSNFRKEFGLYKVREINDYHHAHDAYLNAVVAKAILKKYPKLEPEFVYGDYQKYDLKRYISRSKDPKEVEKATEKYFFYSNLLNFFKEEVHYADGTIVKRENIEYSKDTGEIAWNKEKDFATIKKVLSLPQVNIVKKTEEQTVGQNGGLFDNNIVSKKKVVDASKLIPIKSGLSPEKYGGYARPTIAYSVLVTYKQNNKIKNTMVGIPVLTKLEFERDPNLYLRNLGINNVSHVIKLVKYTVLEFKHKYGTYRRFIVSNQELKRANQIFVTTKQMKLISQYTTLDKNEHDSLLKNNQQLIQSIWNQFLEFMLATDLVNKKQYDELILTNNQTIEECRNIMNRVITTLSFTNINAGQKKIIFDDTLSLPIKRWQFTDSDKMVKKIIESTLIHQSITGLYETRIDLSKLGED

SEQ ID NO: 1302 - protein, 1371 aa, Unknown
  Streptococcus sp. oral taxon 056 str. F0418
MNNNNYSIGLDIGTNSVGWAVITDDYKVPSKKMRVLGNTDKRFIKKNLIGALLFDEGTTAEDRRLKRTARRRYTRRKNRLRYLQEIFAEEMSKVDSSFFHRLDDSFLVPEDKSGSKYPIFATLAEEKEYHKKFPTIYHLRKHLADSKEKADLRLIYLALAHITKYRGHFLYEEAFDIKNNDIQKIFNEFINIYDNTFEGSSLSGQNAQVEAIFTGKISKSVKREHVLKLFPDEKSTGLFSEFLKLIVGNQADFKKHFDLEEKASLQFSKDTYDEDLENLLGQIGDDFADLFLVAKKLYDAILLSGILTVTDPSTKAPLSASMIERYENHQEDLAALKQFIKNNLPEKYAEVFSDQSKDGYAGYIDGKTTQEAFYKYIKNLLSKFEGADYFLDKIEREDFLRKQRTFDNGSIPHQIHLQEMNAILRRQGEHYPLLKENKEKIEKILTFRIPYYVGPLARGNRDFAWLTRNSDQAIRPWNFEEIVDKASSAESFINKMTNYDLYLPEEKVLPKHSLLYETFAVYNELTKVKFIAEGLRDYQFFDSGQKKQIVNQLFKEKRKVTEKDIIHYLHNVDGYDGIELKGIEKQFNASLSTYHDLLKIIKDKEFMDNHKNQEILENIVHTLTIFEDREMIKQRLAQYDSIFDEKVIKALTRRHYTGWGKLSAKLINGICDKKTGKTILDYLIDDGYNNRNFMQLINDDGLSFKEIIQKAQVVGKTDDLTQVVRELSGSPAIKKGILQSIKIVDELVKIMGYAPESIVIEMARENQTTAKGKKNSQQRYKRIEDALKNLAPGLDSTISKENPTDNIQLQNDRLFLYYLQNGKDMYTGEALDINQLSSYDIDHIIPQAFIKDDSLDNRVLTSSKDNRGKSDNVPSLEVVKKRKAFWQQLLDSKLISERKFNNLTKAERGGLDERDKVGFIKRQLVETRQITKHVARILDARFNTEVSEKNQKIRSVKIITLKSNLVSNFRKEFKLYKVREINDYHHAHDAYLNAVVAKAILKKYPKLEPEFVYGDYQKYDLKRYISKSKDPKEVEKATEKYFFYSNLLNFFKEEVHYADGTIVKRENIEYSKDTGEIAWNKEKDFVTIKKVLSYPQVNIVKKREVQTGGFSKESILPKGNSDKLIPRKTKDILWDTTKYGGFDSPVIAYSILLIADIEKGKAKKLKTVKTLVGITIMEKAAFEKNPITFLENKGYHNVRKENILCLPKYSLFELENGRRRLLASAKELQKGNEIVLPVYLTTLLYHSKNVHKLDEPEHLEYIQKHRYEFKDLLNLVSEFSQKYVLAEANLEKIKSLYVDNEQADIEILANSFINLLTFTALGAPAAFKFFGKDVDRKRYTTVSEILNATLIHQSITGLYETRIDLSKLGED

SEQ ID NO: 1303 - protein, 1139 aa, Unknown
  Streptococcus sp. C150
MSDLVLGLDIGIGSVGVGILNKVTGEIIHKNSRIFPAAQAENNLERRTNRQGRRLTRRKKHRRVRLNHLFEESGLITDFTKVSINLNPYQLRVKGLTAELSNEELFIALKNMVKHRGISYLDDASDDGNSSVGDYAQIVKENSKQLETKTPGQIQLERYQKYGQLRGDFTVEEDGRKHRLINVFPTSAYHAEALRILQTQQEFNPQITDEFINSYLEILTGKRKYYHGPGNEKSRTDYGKYTTKKDAQGQYITLNNIFGILIGKCTFYPEEYRAAKASYTAQEFNLLNDLNNLTVPTETKKLSEEQKYQIITYVKNEKAMGPAKLFKYIAKLLSCDVADIKGYRIDKSDKAEIHTFEAYRKMKTLETLDVKKMAREELDKLAYVLTLNTEREGIQEALDHEFADGTFSQEQVDELVQFRKANSSIFGKGWHSFSVKLMMELIPELYATSEEQMTILTRLGKQKTTSSSNKTKYIDEKQLTEEIYNPVVAKSVRQAIKIVNAAIKKYGDFDNIVIEMARETNEDDEKKAIQKIQKANKAEKDAAMRKAANQYNGKAELPHSVFHGHKQLATKIRLWHQQGERCLYTGKTISIHDLINNPNQFEIDHILPLSITFDDSLANKVLVYATANQEKGQRTPYQALDSMDDAWSFRELKAFVRESKALSNKKKEYLLTEEDISKFDVRKKFIERNLVDTRYASRVVLNALQEHFRTHKIDTKVSVVRGQFTSQLRRHWGIEKTRDTYHHHAVDALIIAASSQLNLWKKQKNTLVSYSEDQLLDIETGELISDDEYKESVFKAPYQHFVDTLKSKEFEDSILFSYQVDSKFNRKISDATIYATRKAKLDKEKKEYTYTLGKIKDIYALGTKTPSKTGFYKFLDLYKKDKSQFLMYQKDRRTWDEVIEKILEQYRPFKEKDKNGKEVDFNPFEKYRIENGPIRKYSRKGNGPEIKSLKYYDNLLGRFVDITPSESKNPVALLSLNPWRTDVYYNTETRKYEFLGLKYADLCFEKGGSYGISKVKYNKIREKEGIGKNSEFKFTLYKNDLILIKDTETNRQQIFRFWSRTGKDNPKSFEKHKLELKPYEKTRFEKGEELKVLGKVPPSSNRLQKNMQIENLSIYKVRTDVLGNQHIIKNEGDKPKLDF

SEQ ID NO: 1304 - protein, 1375 aa, Unknown
  Streptococcus sp. M334
MSNKSYSIGLDIGTNSVGWAVITDDYKVPSKKMKVLGNTDKHFIKKNLIGALLFDEGTTAEDRRLKRTARRRYTRRKNRLRYLQEIFSQEISKVDSSFFHRLDDFFLVPEDKRGSKYPIFATLVEEKEYHKKFPTIYHLRKHLADSKEKTDLRLIYLALAHMIKYRGHFLYEESFDIKNNDIQKIFSEFISIYDNTFEGKSLSGQNAQVEAIFTDKISKSTKRERVLKLFPDEKSTGLFSEFLKLIVGNQADFKKHFDLEEKAPLQFSKDTYDEDLENLLGQIGDDFADLFLVAKKLYDAILLSGILTVKDLSTKAPLSASMIERYENHQKDLAALKQFIQNNLQEKYDEVFSDQSKDGYAGYIDGKTTQEAFYKYIKNLLSKFEGADYFLDKIEREDFLKKQRTFDNGSIPHQIHLQEMNAIIRRQGEHYPFLQENKEKIEKILTFRIPYYVGPLARGNGDFAWLTRNSDQAIRPWNFEEIVDQASSAEDFINKMTNYDLYLPEEKVLPKHSLLYETFAVYNELTKVKFIAEGLTRYQFLDKKQKKDIFDTFFKAENKRKVTEKDIIHYLHNVDGYDGIELKGIEKQFNASLSTYHDLLKIIKDKAFMDDSKNEEILENIIHTLTIFEDREMIKQRLAQYDSLFDEKVIKALTRRHYTGWGKLSAKLINGIRDKKSGKTILDYLIDDGEINRNFMQLIHDDGLSFKEIIQKAQVFGKTNDVKQVVQELPGSPAIKKGILQSIKIVDELVKVMGHAPESIVIEMARENQTTARGKKNSQQRYKRIEDSLKNLASGLDSNILKENPTDNIQLQNDRLFLYYLQNGRDMYTGKPLEINQLSNYDIDHIIPQAFIKDDSLDNRVLTSSKDNRGKSDNVPSLEVVEKMKAFWQQLLDSKLISERKFNNLTKAERERGGLNELDKVGFIKRQLVETRQITKHVAQFLDARFNKEVTEKDKKNRNVKIITLKSNLVSNFRKEFGLYKVREINDYHHAHDAYLNAVLAKAILKKYPKLEPEFVYGDYQKYDLQRYISKSREPKEVEKATQKYFFYSNLLNFFKEEVHYADGTIVKRENIEYSKDTGEIAWNKEKDFATVKKVLSLPQVNIVKKTEVQTGGFSKESILPKGNSDKLIPRKTKEILWDTTKYGGFDSPVIAYSILLIADIEKGKAKKLKTVKTLVGITIMEKATFEKNPITFLENKGYHNVRKENILCLPKYSLFELESGRRRMLASAKELQKGNEIVLPVYLTTLLYHSKNVHKLDEPEHLEYIQKHRYEFKDLLNLVSEFSQKYVLADANLEKIKNLYADNEQADIEILANSFINLLTFTALGAPAAFKFLGKDVDRKRYTTVSEILNATLIHQSITGLYETRIDLSKLGED

SEQ ID NO: 1305 - protein, 206 aa, Unknown
  Streptococcus sp. GMD4S
RTPFQALDSMDDAWSYREFKSYVKESKLLGNKKKEYLLTEEDISKIEVKQKFIERNLIDTRYSSRVVLNALQDFYKAHKFDTTISVVRGQFTSQLRRKWGLEKSRETYHHHAVDALIIAASSQLRLWKKQNNPLIAYKEGQFVDSETGEIISLSDDEYKELVFKAPYDHFVDTLSSKTFEDSILFSYQVDSKFNRKISDATIYATR

SEQ ID NO: 1306 - protein, 1122 aa, Streptococcus suis
MSNGKILGLDIGIASVGVGVIDAQTGEIIHASSRIFPSANAANNAERRTFRGSRRLIRRKKHRIKRLDDLFNDFHINLDGEMSTDNPYVLRVKGLSQKLTVEELYISIKNIMKRRGISYLDDAESDNEAGRSDYAKAIERNRQLLTSKTPGEIQLERLEKYGQLRGNFTIIDEEGQSQQIINVFSTSDYVKEVEKILDCQKMYHKFISDEFCDKLIELLREKRKYYVGPGNEKSRTDYGIYRTDGTTLENLFGILIGKCTFYPDQYRSSRASYTAQEFNFLNDLNNLTVPTETKKLSQEQKEFLVNYAKETSVLGAGKILQQIAKLADCKVEDIRGYRLDNKDKPELHTFETYRAMKGLVPLVDIGVLSREQLDILADILTLNTDFEGIREALKKQLPNVFDEKQVKGLASFRKSKSQLFAKGWHNLSQKIMLEVIPELYATSDEQMTILTRLGKFEKSSVAEYPSSINVDEITDEIYNPVVAKSIRQTIKIINASIKKWDEFDQIVIEMPRDRNEDEEKKRIADGQKANAKEKADSILRAAELYCAGKVLPDYVYNGHNQLATKIRLWYQQGERCIYTGQPISIHDLIHNQNQYEIDHILPLSLTFDDSLSNKVLVLATANQEKAQRTPYNYLKSATSAWSYREFKDYVTKRKGIGKKKCEYLTFEEDINGFEVRSKFIQRNLVDTRYASKVILNALQDYFKISGIQTKVSVVRGQFTSQLRHKWGIEKTRETYHHHAVDALIIAASSQLRLWKKQESPLVVDYQEGRQVDLETGEILELTDEQYKELVYQPPYQGFVNTISSSAFDNEILFSYQVDSKVNRKISDATIYATRNAQLGKDKTEGIYVLGKIKDIYTQAGYEAFLKRYTKDKTSFLMYHKDLDTWEKVIEIILRDYREYDEKGKEIGNPFERYRRENGYVKKYSRKGNGTAIKSLKYYDNKLGNHIDITPENSRNAVVLQSLKPWRTDVYFNKETGKYEFLGIKYSDLSFEKGTGEYGISQEKYDSIKIAEGVAKKSIFKFTLYKQDLLFIKDIENNFGKLLRFTSKNDTSKHYVELKPYDKNKFGTEEPLLPVLGNVAKSGQCIKGLNKSNISIYKVRTDILGYRHFIKQEGEHPQLKFKK

SEQ ID NO: 1307 - protein, 1381 aa, Streptococcus suis
MVKKKYAIGIDIGTNSVGWSIVTDDYKVPSKKMKVFGNTEKRYIKKNLLGTLLFDEGNTAENRRLKRTARRRYTRRRNRILYLQEIFAEEINKIDDSFFQRLDDSFLIVEDKQGSKHPIFGTLQEEKEYHKQFPTIYHLRKQLADSSQKADIRLIYLALAHIIKYRGHFLFEGDLKSENKDVQHLFNDFVEMFDKTVEGSYLSENLPNVADVLVEKVSKSRRLENILHYFPNEKKNGLFGNFLALALGLQPNFKTNFELAEDAKIQFSKETYEEDLEELLGKIGDDYADLFIATKSLYDGILLAGILSTTDSTTKAPLSSSMVNRYEEHQKDLALLKNFIHQNLSDSYKEVFNDKLKDGYAGYIEGKTTQENFYRFIKKAIEKIEGSNYFIDKIDREDFLRKQRTFDNGSIPHQIHLQEMHAIIRRQAEFYPFLVENQDKIEKILTFRIPYYVGPLARGKSEFAWLNRKSDEKIRPWNFDEMVDKETSAENFITRMTNYDRYLPDQKVLPKHSLLYEKFAVYNELTKVKFIAEGMRDYQFLDSGQKKDIVKTLFKTKRKVTAKDIKAYLENSNGYAGVELKGLEEQFNASLPTYHDLLKILRDKAFIDAEENQEILEDIVLTLTLFEDREMIRKRLEKYKDILTEEQRKKLERRHYTGWGRLSAKLINGILDKVTRKTILGYLIDDGTSNRNFMQLINDDTLSFVDEIRLAQGSGEAEDYRAEVQNLAGSPAIKKGILQSLKIVDELIEVMGYEPEHIVVEMARENQFTNQGRRNSQQRINRLENALKDFGSKILEEQKPYGVSKVNNIHLQSDRLFLYYLQNGKDMYTDEELDIDHLSEYDIDHIIPQAFIKDDSLDNKVLTKSAKNRGKSDDVPSMEIVHNRKNFWRQLLKSKLISQRKFDNLTKAERGGLTNEDKARFIQRQLVETRQITKHVARMLDTRFNTKLDEAGNRIRDPKVNIITLKSNLVSQFRKDYQLYKIREINNYHHAHDAYINAVVATALLKKYPQLAPEFVYGEYPTYNSYNSRKSATEKVLFYSNIMNFFKRIVVHSKTGEVRIRPVIEVNKETGEIVWDKKSDFRTVRKVLSYPQVNVVKKTEVQNHGLDRGKPKGFYNANLSPRPKEGSVENLVPAKQSFDTKRYGGYAGISNSYAVLVNGIIEKGKKKSKAEVTEFQGISILARKDFDKNPKQYLLNLGYKDIKSIIKLPKYSLFELENGSRRMLASILSTNNKRGEIHKGNEMYLPDKFVTLLYHAMRVNRTLEPGHKKYVETHRHVFDELLIYILEYNEKIVGAKANGKRIVEAYSARKDTDNLEELCNSFINLLNLTALGSAVDFEFLGTKIPRYRDYTPSSLLKATLIHQSVTGLYETRIDLSKLGGD

SEQ ID NO: 1308 - protein, 39 aa, Streptococcus thermophilus
GRCIKGLGKSNISIYKVRTDVLGNQHIIKNEGDKPKLDF

SEQ ID NO: 1309 - protein, 302 aa, Streptococcus thermophilus
MIRRKKHRIVRLNRLFEESGLITDFTKISINLNPYQLRVKGLTDELSNEELFIALKNMVKHRGISYLDDASDDGNSSVGDYAQIVKENSKQLETKTPGQIQLERYQTYGQLRGDFTVEKDGKKHRLINVFPTSAYRSEALRILQTQQEFNPQITDEFINRYLEILTGKRKYYHGPGNEKSRTDYGRYRTSGETLDNIFGILIGKCTFYPDEFRAAKASYTAQEFNLLNDLNNLTVPTETKKLSKEQKNQIINYVKNEKAMGPAKLFKYIAKLLSCDVADIKGYRIDKSGKAERFILSKPIEK

SEQ ID NO: 1310 - protein, 1121 aa, Streptococcus thermophilus
MSDLVLGLDIGIGSVGVGILNKVTGEIIHKNSRIFPAAQAENNLVRRTNRQGRRLTRRKKHRIVRLNRLFEESGLITDFTKISINLNPYQLRVKGLTDELSNEELFIALKNMVKHRGISYLDDASDDGNSSVGDYAQIVKENSKQLETKTPGQIQLERYQTYGQLRGDFTVEKDGKKHRLINVFPTSAYRSEALRILQTQQEFNPQITDEFINRYLEILTGKRKYYHGPGNEKSRTDYGRYRTSGETLDNIFGILIGKCTFYPDEFRAAKASYTAQEFNLLNDLNNLTVPTETKKLSKEQKNQIINYVKNEKAMGPAKLFKYIAKLLSCDVADIKGYRIDKSGKAEIHTFEAYRKMKTLETLDIEQMDRETLDKLAYVLTLNTEREGIQEALEHEFADGSFSQKQVDELVQFRKANSSIFGKGWHNFSVKLMMELIPELYETSEEQMTILTRLGKQKTTSSSNKTKYIDEKLLTEEIYNPVVAKSVRQAIKIVNAAIKEYGDFDNIVIEMARETNEDDEKKAIQKIQKANKDEKDAAMLKAANQYNGKAELPHSVFHGHKQLATKIRLWHQQGERCLYTGKTISIHDLINNSNQFEVDHILPLSITFDDSLANKVLVYATANQEKGQRTPYQALDSMDDAWSFRELKAFVRESKTLSNKKKEYLLTEEDISKFDVRKKFIERNLVDTRYASRVVLNALQEHFRAHKIDTKVSVVRGQFTSQLRRHWGIEKTRDTYHHHAVDALIIAASSQLNLWKKQKNTLVSYSEDQLLDIETGELISDDEYKESVFKAPYQHFVDTLKSKEFEDSILFSYQVDSKFNRKISDATIYATRQAKVGKDKADETYVLGKIKDIYTQDGYDAFMKIYKKDKSKFLMYRHDPQTFEKVIEPILENYPNKQMNEKGKEVPCNPFLKYKEEHGYIRKYSKKGNGPEIKSLKYYDSKLGNHIDITPKDSNNKVVLQSVSPWRADIYFNNTTGKYEILGLKYADLQFEKGTGTYKISQEKYNDIKKKEGVDSDSEFKFTLYKNDLLLVKETETKEQQLFRFLSRTMPKQKHYVELKPYDKQKFEGGEALIKVLGNVANGGQCIKGLGKSNISIYKVRTDVLGNQHIIKNEGDKPKLDF

SEQ ID NO: 1311 - protein, 1121 aa, Streptococcus thermophilus
MSDLVLGLDIGIGSVGVGILNKVTGEIIHKNSRIFPAAQAENNLVRRTNRQGRRLTRRKKHRIVRLNRLFEESGLITDFTKISINLNPYQLRVKGLTDELSNEELFIALKNMVKHRGISYLDDASDDGNSSVGDYAQIVKENSKQLETKTPGQIQLERYQTYGQLRGDFTVEKDGKKHRLINVFPTSAYRSEALRILQTQQEFNPQITDEFINRYLEILTGKRKYYHGPGNEKSRTDYGRYRTSGETLDNIFGILIGKCTFYPDEFRAAKASYTAQEFNLLNDLNNLTVPTETKKLSKEQKNQIINYVKNEKAMGPAKLFKYIAKLLSCDVADIKEYRIDKSGKAEIHTFEAYRKMKTLETLDIEQMDRETLDKLAYVLTLNTEREGIQEALEHEFADGSFSQKQVDELVQFRKANSSIFGKGWHNFSVKLMMELIPELYETSEEQMTILTRLGKQKTTSSSNKTKYIDEKLLTEEIYNPVVAKSVRQAIKIVNAAIKEYGDFDNIVIEMARETNEDDEKKAIQKIQKANKDEKDAAMLKAANQYNGKAELPHSVFHGHKQLATKIRLWHQQGERCLYTGKTISIHDLINNSNQFEVDHILPLSITFDDSLANKVLVYATANQEKGQRTPYQALDSMDDAWSFRELKAFVRESKTLSNKKKEYLLTEEDISKFDVRKKFIERNLVDTRYASRVVLNALQEHFRAHKIDTKVSVVRGQFTSQLRRHWGIEKTRDTYHHHAVDALIIAASIQLNLWKKQKNTLVSYSEDQLLDIETGELISDDEYKESVFKAPYQHFVDTLKSKEFEDSILFSYQVDSKFNRKISDATIYATRQAKVGKDKADETYVLGKIKDIYTQDGYDAFMKIYKKDKSKFLMYRHDPQTFEKVIEPILENYPNKQINEKGKEVPVNPFLKYKEEHGYIRKYSKKGNGPEIKSLKYYDSKLGNHIDITPKDSNNKVVLQSVSPWRADVYFNKTTGKYEILGLKYADLQFEKGTGTYKISQEKYNDIKKKEGVDSDSEFKFTLYKNDLLLVKDTETKEQQLFRFLSRTMPKQKHYVELKPYDKQKFEGGEALIKVLGNVANSGQCKKGLGKSNISIYKVRTDVLGNQHIIKNEGDKPKLDF

SEQ ID NO: 1312 - protein, 1121 aa, Streptococcus thermophilus
MSDLVLGLDIGIGSVGVGILNKVTGEIIHKNSRIFPAAQAENNLVRRTNRQGRRLTRRKKHRRVRLNRLFEESGLITDFTKISINLNPYQLRVKGLTDELSNEELFIALKNMVKHRGISYLDDASDDGNSSVGDYAQIVKENSKQLETKTPGQIQLERYQTYGQLRGDFTVEKDGKKHRLINVFPTSAYRSEALRILQTQQEFNPQITDEFVNRYLEILTGKRKYYHGPGNEKSRTDYGRYRTNGETLDNIFGILIGKCTFYPEEFRAAKASYTAQEFNLLNDLNNLTVPTETKKLSKEQKNQIINYVKNEKAMGPAKLFKYIAKLLSCDVADIKGYRIDKSGKAEIHTFEAYRKMKTLETLDIEQMDRETLDKLAYVLTLNTEREGIQEALEHEFADGSFSQKQVDELVQFRKANSSIFGKGWHNFSVKLMMELIPELYETSEEQMTILKRLGKQKTTSSSNKTKYIDEKLLTEEIYNPVVAKSIRQAIKIVNAAIKEYGDFDNIVIEMARETNEDDEKKAIQKIQKANKDEKDAAMLKAANQYNGKAELPHSVFHGHKQLATKIRLWHQQGERCLYTGKTISIHDLINNPNQFEVDHILPLSITFDDSLANKVLVYATANQEKGQRTPYQALDSMDDAWSFRELKAFVRESKTLSNKKKEYLLTEEDISKFDVRKKFIERNLVDTRYASRVVLNALQEHFRAHKIDTKVSVVRGQFTSQLRRHWGIEKTRDTYHHHAVDALIIAASSQLNLWKKQKNTLVSYSEDQLLDIETGELISDDEYKESVFKAPYQHFVDTLKSKEFEDSILFSYQVDSKFNRKISDATIYATRQAKVGKDKKDETYVLGKIKDIYTQDGYDAFMKIYKKDKSKFLMYRHDPQTFEKVIEPILENYPNKEMNEKGKEVPCNPFLKYKEEHGYIRKYSKKGNDPEIKSLKYYDSKLGNHIDITPKDSNNKVVLQSVSPWRADVYFNKTTGKYEILGLKYADLQFEKGTGTYKISQEKYNDIKKKEGVDSDSEFKFTLYKNDLLLVKDTETKEQQLFRFLSRTMPKQKHYVELKPYDKQKFEGGEALIKVLGNVANSGQCKKGLGKSNISIYKVRTDVLGNQHIIKNEGDKPKLDF

SEQ ID NO: 1313 - protein, 1122 aa, Streptococcus thermophilus
MSDLVLGLDIGIGSVGVGILNKVTGEIIHKNSRIFPAAQAENNVERRTNRQGRRLTRRKKHRRVRLNRLFEESGLITDFTKISINLNPYQLRVRGLTDELSNEELFIALKNMVKHRGISYLDDASDDGNSSVGDYAQIVKENSKQLETKTPGQIQLERYQTYGQLRGDFTVEKDGKKHRLINVFPTSAYRSEALRILQTQQEFNSQITDEFINRYLEILTGKRKYYHGPGNEKSRTDYGRYRTSGETLDNIFGILIGKCTFYPEEFRAAKASYTAQEFNLLNDLNNLTVPTETKKLSKEQKNQIINYVKNEKAMGPAKLFKYIAKLLSCDVADIKGYRIDKSGKAEIHTFEAYRKMKTLETLDIEQMDRETLDKLAYVLTLNTEREGIQEALEHEFADGSFSQKQVDELVQFRKASSSIFGKGWHNFSVKLMMELIPELYETSEEQMTILTRLGKQKTTSSSNKTKYIDEKLLTEEIYNPVVAKSVRQAIKIVNAAIKEYGDFDNIVIEMARETNEDDEKKAIQKIQKANKDEKDAAMLKAANQYNGKAELPHSVFHGHKQLATKIRLWHQQGERCLYTGKTISIHDLINNPNQFEVDHILPLSITFDDSLANKVLVYATANQEKGQRTPYQALDSMDDAWSFRELKAFVRESKTLSNKKKEYLLTEEDISKFDVRKKFIERNLVDTRYASRVVLNALQEHFRAHKIDTKVSVVRGQFTSQLRRHWGIEKTRDTYHHHAVDALIIAASSQLNLWKKQKNTLVSYSEDQLLDIETGELISDDEYKESVFKAPYQHFVDTLKSKEFEDSILFSYQVDSKFNRKLSDATIYATRQAKVGKDKKDETYVLGKIKDIYTQDGYDAFMKIYKKDKSKFLMYRHDPQTFEKVIEPILENYPNKEMNEKGKEVPCNPFLKYKEEHGYIRKYSKKGNGPEIKSLKYYDSKLLGNPIDITPENSKNKVVLQSLKPWRADVYFNKTTGKYEILGLKYADLQFEKKTGTYKISQEKYNGIMKEEGVDSDSEFKFTLYKNDLLLVKDTETKEQQLFRFLSRTMPNVKYYVELKPYSKDKFEKNESLIEILGSADKSGRCIKGLGKSNISIYKVRTDVLGNQHIIKNEGDKPKLDF

SEQ ID NO: 1314 - protein, 1388 aa, Streptococcus thermophilus
MTKPYSIGLDIGTNSVGWAVITDNYKVPSKKMKVLGNTSKKYIKKNLLGVLLFDSGITAEGRRLKRTARRRYTRRRNRILYLQEIFSTEMATLDDAFFQRLDDSFLVPDDKRDSKYPIFGNLVEEKAYHDEFPTIYHLRKYLADSTKKADLRLVYLALAHMIKYRGHFLIEGEFNSKNNDIQKNFQDFLDTYNAIFESDLSLENSKQLEEIVKDKISKLEKKDRILKLFPGEKNSGIFSEFLKLIVGNQADFRKCFNLDEKASLHFSKESYDEDLETLLGYIGDDYSDVFLKAKKLYDAILLSGFLTVTDNETEAPLSSAMIKRYNEHKEDLALLKEYIRNISLKTYNEVFKDDTKNGYAGYIDGKTNQEDFYVYLKNLLAEFEGADYFLEKIDREDFLRKQRTFDNGSIPYQIHLQEMRAILDKQAKFYPFLAKNKERIEKILTFRIPYYVGPLARGNSDFAWSIRKRNEKITPWNFEDVIDKESSAEAFINRMTSFDLYLPEEKVLPKHSLLYETFNVYNELTKVRFIAESMRDYQFLDSKQKKDIVRLYFKDKRKVTDKDIIEYLHAIYGYDGIELKGIEKQFNSSLSTYHDLLNIINDKEFLDDSSNEAIIEEIIHTLTIFEDREMIKQRLSKFENIFDKSVLKKLSRRHYTGWGKLSAKLINGIRDEKSGNTILDYLIDDGISNRNFMQLIHDDALSFKKKIQKAQIIGDEDKGNIKEVVKSLPGSPAIKKGILQSIKIVDELVKVMGGRKPESIVVEMARENQYTNQGKSNSQQRLKRLEKSLKELGSKILKENIPAKLSKIDNNALQNDRLYLYYLQNGKDMYTGDDLDIDRLSNYDIDHIIPQAFLKDNSIDNKVLVSSASNRGKSDDFPSLEVVKKRKTFWYQLLKSKLISQRKFDNLTKAERGGLLPEDKAGFIQRQLVETRQITKHVARLLDEKFNNKKDENNRAVRTVKIITLKSTLVSQFRKDFELYKVCEINDFHHAHDAYLNAVIASALLKKYPKLEPEFVYGDYPKYNSFRERKSATEKVYFYSNIMNIFKKSISLADGRVIERPLIEVNEETGESVWNKESDLATVRRVLSYPQVNVVKKVEEQNHGLDRGKPKGLFNANLSSKPKPNSNENLVGAKEYLDPKKYGGYAGISNSFAVLVKGTIEKGAKKKITNVLEFQGISILDRINYRKDKLNFLLEKGYKDIELIIELPKYSLFELSDGSRRMLASILSTNNKRGEIHKGNQIFLSQKFVKLLYHAKRISNTINENHRKYVENHKKEFEELFYYILEFNENYVGAKKNGKLLNSAFQSWQNHSIDELCSSFIGPTGSERKGLFELTSRGSAADFEFLGVKIPRYRDYTPSSLLKDATLIHQSVTGLYETRIDLAKLGEG

SEQ ID NO: 1315 - protein, 1388 aa, Streptococcus thermophilus
MTKPYSIGLDIGTNSVGWAVITDNYKVPSKKMKVLGNTSKKYIKKNLLGVLLFDSGITAEGRRLKRTARRRYTRRRNRILYLQEIFSTEMATLDDAFFQRLDDSFLVPDDKRDSKYPIFGNLVEEKAYHDEFPTIYHLRKYLADSTKKADLRLVYLALAHMIKYRGHFLIEGEFNSKNNDIQKNFQDFLDTYNAIFESDLSLENSKQLEEIVKDKISKLEKKDRILKLFPGEKNSGIFSEFLKLIVGNQADFRKCFNLDEKASLHFSKESYDEDLETLLGYIGDDYSDVFLKAKKLYDAILLSGFLTVTDNETEAPLSSAMIKRYNEHKEDLALLKEYIRNISLKTYNEVFKDDTKNGYAGYIDGKTNQEDFYVYLKNLLAEFEGADYFLEKIDREDFLRKQRTFDNGSIPYQIHLQEMRAILDKQAKFYPFLAKNKERIEKILTFRIPYYVGPLARGNSDFAWSIRKRNEKITPWNFEDVIDKESSAEAFINRMTSFDLYLPEEKVLPKHSLLYETFNVYNELTKVRFIAESMRDYQFLDSKQKKDIVRLYFKDKRKVTDKDIIEYLHAIYGYDGIELKGIEKQFNSSLSTYHDLLNIINDKEFLDDSSNEAIIEEIIHTLTIFEDREMIKQRLSKFENIFDKSVLKKLSRRHYTGWGKLSAKLINGIRDEKSGNTILDYLIDDGISNRNFMQLIHDDALSFKKKIQKAQIIGDEDKGNIKEVVKSLPGSPAIKKGILQSIKIVDELVKVMGGRKPESIVVEMARENQYTNQGKSNSQQRLKRLEKSLKELGSKILKENIPAKLSKIDNNALQNDRLYLYYLQNGKDMYTGDDLDIDRLSNYDIDHIIPQAFLKDNSIDNKVLVSSASNRGKSDDFPSLEVVKKRKTFWYQLLKSKLISQRKFDNLTKAERGGLLPEDKAGFIQRQLVETRQITKHVARLLDEKFNNKKDENNRAVRTVKIITLKSTLVSQFRKDFELYKVREINDFHHAHDAYLNAVIASALLKKYPKLEPEFVYGDYPKYNSFRERKSATEKVYFYSNIMNIFKKSISLADGRVIERPLIEVNEETGESVWNKESDLATVRRVLSYPQVNVVKKVEEQNHGLDRGKPKGLFNANLSSKPKPNSNENLVGAKEYLDPKKYGGYAGISNSFAVLVKGTIEKGAKKKITNVLEFQGISILDRINYRKDKLNFLLEKGYKDIELIIELPKYSLFELSDGSRRMLASILSTNNKRGEIHKGNQIFLSQKFVKLLYHAKRISNTINENHRKYVENHKKEFEELFYYILEFNENYVGAKKNGKLLNSAFQSWQNHSIDELCSSFIGPTGSERKGLFELTSRGSAADFEFLGVKIPRYRDYTPSSLLKDATLIHQSVTGLYETRIDLAKLGEG

SEQ ID NO: 1316 - protein, 595 aa, Streptococcus thermophilus
MVQFRKANSSIFGKGWHNFSVKLMMELIPELYETSEEQMTILKRLGKQKTTSSSNKTKYIDEKLLTEEIYNPVVAKSVRQAIKIVNAAIKEYGDFDNIVIEMARETNEDDEKKAIQKIQKANKDEKDAAMLKAANQYNGKAELPHSVFHGHKQLATKIRLWHQQGERCLYTGKTISIHDLINNPNQFEVDHILPLSITFDDSLANKVLVYATANQEKGQRTPYQALDSMDDAWSFRELKAFVRESKTLSNKKKEYLLTEEDISKFDVRKKFIERNLVDTRYASRVVLNALQEHFRAHKIDTKVSVVRGQFTSQLRRHWGIEKTRDTYHHHAVDALIIAASSQLNLWKKQKNTLVSYSEDQFLDIETGELISDDEYKESVFKAPYQHFVDTLKSKEFEDSILFSYQVDSKFNRKISDATIYATRKAKLDKEKKEYTYTLGKIKDIYTQAGYDAFIKIYKKDKSKFLMYHHDPQTFEKVIEPILENYPNKEINEKGKEVPCNPFLKYKEEHGYIRKYSKKGNGPEIKSFKYYDNLLGRHIDITPKNSKNIVALRKLNPWRTDVYFNHETMKYEFLGLKYADISYKKSKNKAGDFLPK

SEQ ID NO: 1317 - protein, 1388 aa, Streptococcus thermophilus]
MTKPYSIGLDIGTNSVGWAVITDNYKVPSKKMKVLGNTSKKYIKKNLLGVLLFDSGITAEGRRLKRTARRRYTRRRNRILYLQEIFSTEMATLDDAFFQRLDDSFLVPDDKRDSKYPIFGNLVEEKVYHDEFPTIYHLRKYLADSTKKADLRLVYLALAHMIKYRGHFLIEGEFNSKNNDIQKNFQDFLDTYNAIFESDLSLENSKQLEEIVKDKISKLEKKDRILKLFPGEKNSGIFSEFLKLIVGNQADFRKCFNLDEKASLHFSKESYDEDLETLLGYIGDDYSDVFLKAKKLYDAILLSGFLTVTDNETEAPLSSAMIKRYNEHKEDLALLKEYIRNISLKTYNEVFKDDTKNGYAGYIDGKTNQEDFYVYLKNLLAEFEGADYFLEKIDREDFLRKQRTFDNGSIPYQIHLQEMRAILDKQAKFYPFLAKNKERIEKILTFRIPYYVGPLARGNSDFAWSIRKRNEKITPWNFEDVIDKESSAEAFINRMTSFDLYLPEEKVLPKHSLLYETFNVYNELTKVRFIAESMRDYQFLDSKQKKDIVRLYFKDKRKVTDKDIIEYLHAIYGYDGIELKGIEKQFNSSLSTYHDLLNIINDKEFLDDSSNEAIIEEIIHTLTIFEDREMIKQRLSKFENIFDKSVLKKLSRRHYTGWGKLSAKLINGIRDEKSGNTILDYLIDDGISNRNFMQLIHDDALSFKKKIQKAQIIGDEDKGNIKEVVKSLPGSPAIKKGILQSIKIVDELVKVMGGRKPESIVVEMARENQYTNQGKSNSQQRLKRLEKSLKELGSKILKENIPAKLSKIDNNALQNDRLYLYYLQNGKDMYTGDDLDIDRLSNYDIDHIIPQAFLKDNSIDNKVLVSSASNRGKSDDFPSLEVVKKRKTFWYQLLKSKLISQRKFDNLTKAERGGLLPEDKAGFIQRQLVETRQITKHVARLLDEKFNNKKDENNRAVRTVKIITLKSTLVSQFRKDFELYKVREINDFHHAHDAYLNAVIASALLKKYPKLEPEFVYGDYPKYNSFRERKSATEKVYFYSNIMNIFKKSISLADGRVIERPLIEVNEETGESVWNKESDLATVRRVLSYPQVNVVKKVEEQNHGLDRGKPKGLFNANLSSKPKPNSNENLVGAKEYLDPKKYGGYAGISNSFAVLVKGTIEKGAKKKITNVLEFQGISILDRINYRKDKLNFLLEKGYKDIELIIELPKYSLFELSDGSRRMLASILSTNNKRGEIHKGNQIFLSQKFVKLLYHAKRISNTINENHRKYVENHKKEFEELFYYILEFNENYVGAKKNGKLLNSAFQSWQNHSIDELCSSFIGPTGSERKGLFELTSRGSAADFEFLGVKIPRYRDYTPSSLLKDATLIHQSVTGLYETRIDLAKLGEG

SEQ ID NO: 1318 - protein, 1038 aa, Streptococcus vestibularis
MIDELSNEELFIALKNMVKHRGISYLDDASDDGNSSVGDYAQIVKENSKQLETKTPGQIQLERYQKYGQLRGDFTVEEDGKKHRLINVFPTSAYRAEALRILQTQQEFNSQITDEFINRYLEILTGKRKYYHGPGNEKSRTDYGRYRTSGETLDNIFGILIGKCTFYPEEFRAAKASYTAQEFNLLNDLNNLTVPTETKKLSEEQKNQIINYVKNEKAMGPAKLFKYIAKLLSCDIADIKGYRIDKSDKAEIHTFEAYRKMKTLETIDIEKMSREELDKLAYVLTLNTEREGIQEALEHEFVDGNFSQEQIDELVQFRKANSSIFGKGWHNFSVKLMMELIPELYATSEEQMTILTRLGKQKTTSSSNKTKYIDEKLLTEEIYNPVVAKSVRQAIKIVNAAIKEYGDFDNIVIEMARATNEDDEKKAIQKIQKANKDEKDAAMLKAANQYNGKAELPHSVFHGHKQLATKIRLWHQQGERCLYTGKTISIHDLINNPNQFEIDHILPLSITFDDSLANKVLVYATANQEKGQRTPYQALDSMDDAWSFRELKAFVRESKTLSNKKKEYLLTEEDISKFDVRKKFIERNLVDTRYASRVVLNALQEHFRAHKIDTKVSVVRGQFTSQLRRHWGIEKTRDTYHHHAVDALIIAASSQLNLWKKQKNTLVNYSENQLLDIETGELISDDEYKESVFKAPYQHFVDTLKSKEFEDSILFSYQVDSKFNRKISDATIYATRKAKLDKEKKEYTYTLGKIKDIYALGTKTPSKTGFYKFLDLYKKNKSQFLMYQKDRKTWDEVIEKILEQYRPFKEKDKNGKEVDFNPFEKYRIENGPIRKYSRKGNGPEIKSLKYYDNLLGRFVDITPSESKNPVALLSLNPWRTDVYYNTETRKYEFLGLKYADLCFEKGGSYGISKVKYNKIREKEGIGKNSEFKFTLYKNDLILIKDTETNRQQVFRFWSRTGKDNPKRFEKHKIELKPYEKARFEKGEELEVLGKVPPSSNQLQKNMQIENLSIFKVRTDVLGNQHIIKNEGDKPKLDF

SEQ ID NO: 1319 - protein, 97 aa, Streptococcus vestibularis
MSDLVLGLDIGIGSVGVGILNKVTGEIIHKNSRIFPAAQAENNVERRTNRQGRRLTRRKKHRRVRLNHLFEESGLITDFTKVSINLNPYQLRVKIDR

SEQ ID NO: 1320 - protein, 1084 aa, Unknown
  Subdoligranulum sp. 4_3_54A2FAA
MKNTLYGIGLDIGVASVGWAVVGLNGTGEPVGLHRLGVRIFDKAEQPKTGESLAAPRRMARGMRRRLRRKALRRADVYALLERSGLSTREELAQMFEAGGLEDIYALRTRALDEPVGKAEFSRILLHLAQRRGFKSNRRTASDGEDGRLLAAVNENRRRMAQGGWRTVGEMLYRHEAFALHKRNKADDYLSTVGRDMVAEEASILFERQRAMGCSWAAPELQAEYLSILLRQRSFDEGPGGNSPYGGNQVEKMVGRCTFEPDEPRAAKAAYSFEYFSLLQKLNHIRLAENGETRPLTQPQRQQLLSLAHKTPDISLARIRKELALPETVQFNGVRCRANETLEESEKKEKFACLPAYHKMRKALDGVVKGRISSLSISQRDAAATALSLYKNEDTLRAKLTEAGFQAPEIDALAGLTGFSKFGHLSLKACRKLIPHLEQGLTYDQACTAAGYDFKGHGAGERAFTLPAAAPEMEQITSPVVRRAVAQTIKVVNGIIREMDASPAWVRIELARELSKTFGERQEMDRSMRENAAQNERLMQELRDTFHLLSPTGQDLVKYRLWKEQDGVCAYSLRRLDVERLFEPGYVDVDHIVPYSLSFDDRRSNKVLVLSSENRQKGNRLPLQYLQGKRREDFIVWTNSSVHDYRKRQNLLREKLSGDEAEGFRQRNLQDTQHMARFLYNYISDHLAFAQSEALGKKRVFAVSGAVTSHLRKRWGLSKVRADGDLHHALDAAVVACTTDGMIRRISGYYGHIEGEYLQDADGAGSQHARTKERFPAPWPRFRDELIVRLSEQPAEPLLDINPEFYCEYGTEHIRPVFVSRMPRRKVTGPGHKETIKGAAAADEGLLTVRKALTELKLDKDGEIKDYYMPSSDTLLYEALKAQLRRFGGDGKKAFAEPFYKPKADGTPGPLVRKVKTTEKATLTVPVHGGAASNDTMVRVDVFLVPGDGYYWVPVYTADTLKPELPNRAVVQGKPYSEWKEMREEDFIFSLYPNDLVYVEHKSGLKFTLQNADSTLEKTRTQTSAFAYFVSGSISTASITIRTHDNAYGIPSLGVKTLKTFHKYQVDVLGNVFPVHKETRQKFR

SEQ ID NO: 1321 - protein, 951 aa, Sutterella parvirubra
MPTVRPVFHSSASFDLGAKNTGLFLVNHPAGAAPSAEYAAAYTIVQPADGDGLNYSTTNRRAVRHRLRGGKRFKLARRLVLQVIDALRKLKPGLIRDEEMRRTVEALSSLLKRRGFTRIESEAQVDPTTLDSVDPAVFADHETLGGFFSLGIPISTQWDALSQNPGAVEQLFKALPSAKDFGKYVTEQFPEFAEQKKLYADAIKVLSSEAKSIVMQLGLGHHHRSKYFEMIAHDMLRDPRLQGVFELFGSEERFKTFICNVSNLQLRALRWYFDEPNPEVANQWNPEKFQVVWLRGLKYFHPDAERKADMKKLIDELTASKDILDALCTTDPRRTIPPYEDQNNRRPPFDQTLWLSAAELTRRYGDKWRIWSQKFERADRALSTGLDEILLYTDRRSRMFNRNQDPSVYADSYVLQRVLDRSSKLDRYALRALAAGYRTQELHEPLATLSDTLGTQHVETFLTFAAEYYEEVAAAKNGLWLDGPSRLLERADIHPPMKKKVLDLLLGNILDATPEIGRILRTVLWNRHVHEKSRSTPASLCRSIEAIRKDFGGEFRMRYDALDAKIRAAEDQKKKFKPTNAEEKDLFKAWNATKTMHAFLRDVLQLTPKQLERTASPYVFAQLHTLIDTERDGFTSTSLAAHLENHWRMRANAAGMAQCSRLPADAVRPFDGVLSKALDRQAFEAAKLAAQHLMSRKELTDTDIRYSIIIESNRFAFSASTAELKKNTLAKKNAEKGLNFELKRWQDKDSRIREASRGICAYTGAKLGDVVEYDHIIPRAFTTSAMGSVFNSEANLICVSRPGNQTKADKRYGLNKLHKTYLTAVFGTADVTTIAASIEDIVGKLASANRLRHFELLNEKEQDAVRHALFLDDESDARRIVLRELAAQNKSRVNGTQAWFVRAFMTKLLEITKDWRERTGNTLDIRSWKTDAEVASRLRSALNFHAEITLT

SEQ ID NO: 1322 - protein, 406 aa, Sutterella parvirubra
SNLFREEVPYGDHFLPIIQMKNRIYIGYQLPKADGTGGNAVAVLGKDPLELLETLKPFLDREPQAFSDHPVTYKMINERAYELLTKCALTPDQTTELERTQAEVLRSLNYQTSRAAVLGRLVDDKNKFVAKDAVWKEKDFVISFKLSPKKSAFKASGQLELPAKSDWKALVDSPELAINWGQPADDTFSQRIERKVRMNSSHLEHTPKKRVVSLPVVDKPSGGFRIRRHNLDGSAVFQVHTVANNKYGGFSADSAGKVDWSTPVLCGHLQHANLVPLDPETASAEQLVRMSEWRVVETTSDIRLEVCPGTSGRRYVRVELPFTLLQEWLTAGKVADVPVSPLHLPGSIKLTDPKTFCAEAQKTLSIFAQPRATIFFEQLGDRVRFRFEASGGPATMNAAYNAAGRS

SEQ ID NO: 1323 - protein, 389 aa, Sutterella wadsworthensis
MKACDLEEKTNHLQACVAIDLGARYTGTFSILHKSSHLPSKDDCRAATYVLPEDGGKMTYSQRNRTAVRHRIRGKKRFALARRMAMLIIREKLAAKSVTLTSSETRRLAEAVGSLLRRRGYNRLETETDNDLTVLENIEPEVFSEHEILGKYFYAGTDLAIQWETLSQDLSKISSLLAERLSEKDFKKYLTGLIPDDKNKIKHIISVFKMLIDEAESINMQCVLGHKHRTQYLSDIHADMHRDTRLSKAAEAFGGVDRLWRLLGNLSNLQLRAHRWYFNAPHLFDDQALEPARLQKTLVRAFKYLHCPQGVESRAQAELVKELEEADDIIDALCTIDPVRTIPPYENQQNRRPPFDQTLYLSPDLGVSGFLCLGRLFQGQPNEAALCFL

SEQ ID NO: 1324 - protein, 976 aa, Unknown
  Tannerella sp. 6_1_58FAA_CT1
MKKILGLDLGSNSIGWALVNEAENRDEASSIIKLGVRVNPLTVDEMQNFEKGKSITTNADRTLKRSMRRNLQRYKLRRDALIKLLKKVGFITDGTILSEQGNRTTFETYRLRAKAPDEEISLQELARVLLMINKKRGYKSSRKIKEKEAGTLIDGMEVAKKLYDEDLTPGQLCLQLLESGKKSLPDFYSSDLQEEFDRIWNFQKQFNPKAFCDTAKEEIKGKNKSQTWAILAKYFIWMEEMDVWNEKESKTERVEKECKLVGLKRTVKKEEQRKENYCWRVQALTEQLDLEKVAVVLQEINGQISTSSGYLGAISDRSKVLYFNRQTVGQYQMAELEKNPNTSLRNMVFYRQDYLDEFDKIWEKQAEFHKELTVELKKEIRDIIIFYQRRLKSQKGLIGFCEFENREIMVEKNGKMQAKVVGCKVIPRSHPLFQEFKIWQTLNNVEVFAGEKKCKRKRTDAFPGLFDGTEDTLMVEGWRYLYQEEKEILAKELSVKKSLKKEYILKLLFDNPQDLDMNFEQIEGNDTGNVLFSAYSKMIEKYGYEPLDFGKPTDKIIEQLQVIFADLGWNTDLLFVDLNKEGKDLEKQPYFKLWHLLYSFEGDNTPTGNGKLVEKLMELCHVGKECALELVNISFQNDYGSLSAKAIKKILPYLKEGNRYDVACGYAGYRHSKSSLTKEEIENKVLKDKLDILPKNSLRNPVVEKILNQMVNVINAIIDTYGKPDEIRVELARELKKSAKEREELTKAIAKSTREHEEIRKVLQEEFGMINVSRNDIIRYKLYKELKDNGYKTLYSNQDIPKEKVFSKEIDIEHIIPQARLFDDSLSNKTLEYKAINIEKGNKTAYDFVKEKYGEKGLQQYLNRCESLFKGHRTKLRKLKMGQENIPEGFIDRDLRNTQYIAKKALAMLNEICRRVVATTGSITDRLREDWQLVDVLKELRCFRYFKDTKMKANHNKNIFYTSIKVDVSDTSKILK

SEQ ID NO: 1325 - protein, 1049 aa, Tistrella mobilis
MINERLTFGIDLGIGSCGWAVLRHADAAGEPGVIEGLGSWCFDVPETSKERIPTNQVRRSNRLLRRVIRRRRNRMAEIRRLFHAQGLLPSADEDALKRPRLDPWELRARGLDQCLSAEEFAVALGHIARHRGFRSSAKRKAANTSGEDSKMLSALLVTRERTARYRTVGEMFARDPEYSARRRNRDGIFDRTVARDDLIHEVGKLFEAQRARGSAFASPDLEADFNAIAFRQAEMQDSERLVGNCPFERDEKRAARWAPSFERFRLLTRLINLRIATAEGERRFTPEDLARVSAELGATAKLPVSRVRALIGLLPDERFTTIRVEDEDRDIVARTGEAAPGTWRLRKTLGEALWAEMQARPDQLDAIAHVLSFFEATAKIRSELDRLGLPAAVIEALDRGLEDGAFAKFKGAGHISAKACRNLLPHLQQGHRYDQACRLAGYDHAASTLSHTAQVVSKAGFNALVTELGESIANPIARKALTEGLKQIRAMCARWGLPGAIHIELAREVGNSIEKRRELESQRETTTKRRQTERDEIRGLLALEDVDDDTLLRYRLWKEQGGKCLYTGKDIHVRQLIATDNSVQVDHILPWSRFGDDSFNNKTLCLASANQRKRGQTPWEWFSLTGTPEAWEVFASRVETSKDLRGFKKRNLLLKNADEVAQRFRSRNLNDTRYAARLLAEAAKLFYPAGDRQEKDGRRRVLTRPGPLTAALRHAWGLESLKKADGKRVSDDRHHALDALAVAAISEREVQRLTRSFQEWEQQGLARPLRHVAPPWPGFRGDVLAAYAQAFVARPERRRARGKGHDASIRQVVGEGPEAQVFERRGLADLKEADLDRVKDPERNQAIIEAVRAWILAGRPADAPPRSPRGDVIVKLRTAPAKKIKPAVPVRGGTADRGDMVRIDVFTRPNRKGRDEWYLVPIYPHQVMNRKAWPHPPMRSVVAYKDEAGWTEIGAEHSFRFSLYPRSYVQLVKSNGDVIEGYLVSMDRSTGAFRVFVHNNPAEMAKGIGAKTLLNLRKFNVDRFGVRTEVKSEVRTWHGEVCTSPVPPD

SEQ ID NO: 1326 - protein, 1395 aa, Treponema denticola
MKKEIKDYFLGLDVGTGSVGWAVTDTDYKLLKANRKDLWGMRCFETAETAEVRRLHRGARRRIERRKKRIKLLQELFSQEIAKIDEGFFQRMKESPFYAEDKTILQENALFNDKDFTDKTYHKAYPTINHLIKAWIENKVKPDPRLLYLACHNIIKKRGHFLFEGDFDSENQFDTSIQALFEYLREDMEVDIDADSQKVKEILKDSSLKNSEKQSRLNKILGLKPSDKQKKAITNLISGNKINFADLYDNPDLKDAEKNSISFSKDDFDALSDDLASILGDSFELLLKAKAVYNCSVLSKVIGDEQYLSFAKVKIYEKHKTDLTKLKAVIKKHFPNNYKKVFGYNQDNESKNNYSGYVGVCKTKNKKLVINNSVNQEDFYKFLKPILSAKSEIKEVNDILAEIETGNFLPKQISKSNAEIPYQLRKMELEKILSNAEKHFSFLKQKDEKGLSHSEKIIMLLTFKIPYYIGPINDNHKKSFPDRCWVVKKEKSPSGKTTPWNFFDHIDKEKTAEEFITSRTNFCTYLIGESVLPKNSLLYSEYTVLNEINNLQIIIDGKNICDTKLKQKIYEDLFKKYKKITQKQISTFIKHEGICNKTDEVIILGIDKECTSSLKSYIELKNIFGKQVDEISTKNMLEEIIRWATIYDEGEGKTILKTKIKAEYGKYCSDEQIKKILNLKFSGWGRLSRKFLETVTSEMPGFSEPVNIITAMRETQNNLMELLSSEFKFTENIKKINSGFEDAEKQFSYDGLVKPLFLSPSVKKMLWQTLKLVKEISHITQAPPKKIFIEMAKGAELEPARTKTRLKILQDLYSSCKNDADAFSSEIQYLSGKIENEDNLRLRSDKLYLYYTQLGKCMYCGKPIEIGHVFDTSNYDIDHIYPQSKIKDDSISNRVLVCSSCNKNKEDKYPLKSEIQSKQRGFWNFLQRNNFISLEKLNRLTRTTPISDDETAKFIARQLVETRQATKVAAKVLEKMFPETKIVYSKAETVSMFRNKFDIIKCREINDFHHAHDAYLNIVVGNVYNTKFTNNPWNFIKEKRDNPKIADTYNYYKVFDYDVKRNNITAWEKGKTIITVKDMLKRNTPIYTRQAACKKGGLFDQTIMKKGLGQHPLKKEGPFSNISKYGGYNKVSAAYYTLIEYEEKGNKIRSLETIPLYLVKDIQKDQDVLKSYLTDLLGKKEFKILVPKIKINSLLKINGFPCHITGKTNDSFLLRPAVQFCCSNDEVLYFKKIIRFSEIRSQREKIGKTISPYEDLSFRSYIKENLCKKTKNDEIGEKEFYDLLQKKNLEIYDMLLTKHKDTIYKKRPNSATIDILVKGKEKFKSLIIENQFEVILEILKLFSATRNVSELQHIGGSKYSGVAKIGNKISSLDNCILIYQSITGIFEKRIDLLKV

SEQ ID NO: 1327 - protein, 769 aa, Treponema denticola
MKKEIKDYFLGLDVGTGSVGWAVTDTDYKLLKANRKDLWGMRCFETAETAEVRRLHRGARRRIERRKKRIKLLQELFSQEIAKIDEGFFQRMKESPFYAEDKTILQENALFNDKDFTDKTYHKAYPTINHLIKAWIENKVKPDPRLLYLACHNIIKKRGHFLFEGDFDSENQFDTSIQALFEYLREDMEVDIDADSQKVKEILKDSSLKNSEKQSRLNKILGLKPSDKQKKAITNLISGNKINFADLYDNPDLKDAEKNSISFSKDDFDALSDDLASILGDSFELLLKAKAVYNCSVLSKVIGDEQYLSFAKVKIYEKHKTDLTKLKAVIKKHFPNNYKKVFGYNQDNESKNNYSGYVGVCKTKNKKLVINNSVNQEDFYKFLKPILSAKSEIKEVNDILAEIETGNFLPKQISKSNAEIPYQLRKMELEKILSNAEKHFSFLKQKDEKGLSHSEKIIMLLTFKIPYYIGPINDNHKKSFPDRCWVVKKEKSPSGKTTPWNFFDHIDKEKTAEEFITSRTNFCTYLIGESVLPKNSLLYSEYTVLNEINNLQIIIDGKNICDTKLKQKIYEDLFKKYKKITQKQISTFIKHEGICNKTDEVIILGIDKECTSSLKSYIELKNIFGKQVDEISTKNMLEEIIRWATIYDEGEGKTILKTKIKAEYGKYCSDEQIKKILNLKFSGWGRLSRKFLETVTSEMPGFSEPVNIITAMRETQNNLMELLSSEFKFTENIKKINSGFEDAEKQFSYDGLVKPLFLSPSVKKCCGRL

SEQ ID NO: 1328 - protein, 1395 aa, Treponema denticola
MKKEIKDYFLGLDVGTGSVGWAVTDTDYKLLKANRKDLWGMRCFETAETAEVRRLHRGARRRIERRKKRIKLLQELFSQEIAKIDEGFFQRMKESPFYAEDKTILQENALFNDKDFTDKTYHKAYPTINHLIKAWIENKVKPDPRLLYLACHNIIKKRGHFLFEGDFDSENQFDTSIQALFEYLREDMEVDIDADSQKVKEILKDSSLKNSEKQSRLNKILGLKPSDKQKKAITNLISGNKINFADLYDNPDLKDAEKNSISFSKDDFDALSDDLASILGDSFELLLKAKAVYNCSVLSKVIGDEQYLSFAKVKIYEKHKTDLTKLKAVIKKHFPNNYKKVFGYNQDNESKNNYSGYVGVCKTKNKKLVINNSVNQEDFYKFLKPILSAKSEIKEVNDILAEIETGNFLPKQISKSNAEIPYQLRKMELEKILSNAEKHFSFLKQKDEKGLSHSEKIIMLLTFKIPYYIGPINDNHKKSFPDRCWVVKKEKSPSGKTTPWNFFDHIDKEKTAEEFITSRTNFCTYLIGESVLPKNSLLYSEYTVLNEINNLQIIIDGKNICDTKLKQKIYEDLFKKYKKITQKQISTFIKHEGICNKTDEVIILGIDKECTSSLKSYIELKNIFGKQVDEISTKNMLEEIIRWATIYDEGEGKTILKTKIKAEYGKYCSDEQIKKILNLKFSGWGRLSRKFLETVTSEMPGFSEPVNIITAMRETQNNLMELLSSEFKFTENIKKINSGFEDAEKQFSYDGLVKPLFLSPSVKKMLWQTLKLVKEISHITQAPPKKIFIEMAKGAELEPARTKTRLKILQDLYSSCKNDADAFSSEIQYLSGKIENEDNLRLRSDKLYLYYTQLGKCMYCGKPIEIGHVFDTSNYDIDHIYPQSKIKDDSISNRVLVCSSCNKNKEDKYPLKSEIQSKQRGFWNFLQRNNFISLEKLNRLTRTTPISDDETAKFIARQLVETRQATKVAAKVLEKMFPETKIVYSKAETVSMFRNKFDIIKCREINDFHHAHDAYLNIVVGNVYNTKFTNNPWNFIKEKRDNPKIADTYNYYKVFDYDVKRNNITAWEKGKTIITVKDMLKRNTPIYTRQAACKKGELFNQTIMKKGLGQHPLKKEGPFSNISKYGGYNKVSAAYYTLIEYEEKVNKIRSLETIPLYLVKDIQKDQDVLKSYLTDLLGKKEIKILVPKIKINSLLKINGFPCHITGKTGDSFVLRPAVQFCCSNDEVLYFKKIIRFNEIRSQREKMGKTISPYEDLSFRSYIKENLCKKTKADEIGEKEFYDLLQKKNLEIYDMLLTKHKDTIYNKRPNSTTLGMLTKGRYEFINLKPKDQIIVMLEILKLFCTTREAIDLGLIKGKPAAGVATLGKKISNLDNCILIYQSITGIFEKRIDLLKV

SEQ ID NO: 1329 - protein, 1395 aa, Treponema denticola
MKKEIKDYFLGLDVGTGSVGWAVTDTDYKLLKANRKDLWGMRCFETAETAEVRRLHRGARRRIERRKKRIKLLQELFSQEIAKIDEGFFQRMKESPFYAEDKTILQENTLFNDKDFTDKTYHKAYPTINHLIKAWIENKVKPDPRLLYLACHNIIKKRGHFLFEGDFDSENQFDTSIQALFEYLREDMEVDIDADSQKVKEILKDSSLKNSEKQSRLNKILGLKPSDKQKKAITNLISGNKINFADLYDNPDLKDAEKNSISFSKDDFDALSDDLASILGDSFELLLKAKAVYNCSVLSKVIGDEQYLSFAKVKIYEKHKTDLTKLKNVIKKHFPKDYKKVFGYNKNEKNNNNYSGYVGVCKTKSKKLIINNSVNQEDFYKFLKTILSAKSEIKEVNDILTEIETGTFLPKQISKSNAEIPYQLRKMELEKILSNAEKHFSFLKQKDEKGLSHSEKIIMLLTFKIPYYIGPINDNHKKSFPDRCWVIKKEKSPSGKTTPWNFFDHIDKDKTAEAFITSRTNFCTYLVGESVLPKSSLLYSEYTVLNEINNLQIIIDGKNICDIKLKQKIYEELFKKYKKITQKQISTFIKHEGICNKTDEVIILGIDKECTSSLKSYIELKNIFGKQVDEISTKNMLEEIIRWATIYDEGEGKTILKTKIKAEYGKYCSDEQIKKILNLKFSGWGRLSRKFLETVTSEMPGFSEPVNIITAMRETQNNLMELLSSEFKFTENIKKINSGFEDAEKQFSYNGLVKPLFLSPSVKKMLWQTLKLVKEISHITQAPPKKIFIEMAKGAELEPARTKTRLKILQDLYNNCKNDADAFSSEIKDLSGKIENEDNLRLRSDKLYLYYTQLGKCMYCGKPIEIGHVFDTSNYDIDHIYPQSKIKDDSISNRVLVCSSCNKNKEDKYPLKSEIQSKQRGFWNFLQRNNFISLEKLNRLTRTTPISDDETAKFIARQLVETRQATKVAAKVLEKMFPETKIVYSKAETVSMFRNKFDIIKCREINDFHHAHDAYLNIVVGNVYNTKFTNNPWNFIKEKRDNPKIADTYNYYKVFDYDVKRNNITAWEKGKTIITVKDMLKRNTPIYTRQAACKKGGLFDQTIMKKGLGQHPLKKEGAFSNISKYGGYNKVSAAYYTLIEYEEKGNKIRSLETIPLYLVKDIQKDQDVLKSYLTDLLGKKEIKILVPKIKINSLLKINGFPCHITGKTGDSFVLRPAVQFCCSNDEVLYFKKIIRFNEIRSQREKMGKTISPYEDLSFRSYIKENLCKKTKADEIGEKEFYDLLQKKNLEIYDMLLTKHKDTIYNKRPNSTTLGMLTKGRYEFINLKPKDQIIVMLEILKLFCTTREAIDLGLIKGKPAAGVATLGKKISNPDNCILIYQSITGIFEKRIDLLKV

SEQ ID NO: 1330 - protein, 1395 aa, Treponema denticola
MKKEIKDYFLGLDVGTGSVGWAVTDTDYKLLKANRKDLWGMRCFETAETAEVRRLHRGARRRIERRKKRIKLLQELFSQEIAKIDEGFFQRMKESPLYAEDKTILQENTLFNDKDFTDKTYHKAYPTINHLIKAWIENKVKPDPRLLYLACHNIIKKRGHFLFEGDFDSENQFDTSIQALFEYLREDMELDIDADSQKVKEILKDSSLKNSEKQSRLNKMLGLKPSDKQKKAITNLISGNKINFADLYDNPDLKDAEKNSISFSKDDFDALSDDLASILGDSFELLLKAKAVYNCSVLSKVIGDEQYLSFAKVKIYEKHKTDLTKLKNVIKKHFPKDYKKVFGYNKNEKNNNNYSAYVGVCKITHKKLVIKNSASQEDFYKFLKTILSAKSEIKEVNDILTEIETGTFLPKQISKSNAEIPYQLRKMELEKILSNAEKHFSFLKQKDEKGLSHSEKIIMLLTFKIPYYIGPINDNHKKSFPDRCWVVKKEKSPSGKTTPWNFFDHIDKEKTAEEFITSRTNFCTYLIGESVLPKSSLLYSEYTVLNEINNLQIIIDGKNICDIKLKQKIYEELFKKYKKITQKQISTFIKHEGICNKTDEVIILGIDKECTSSLKSYIELKNIFGKQVDEISTKNMLEEIIRWATIYDEGEGKTILKTKIKAEYGKYCSDEQIKKILNLKFSGWGRLSRKFLETVTSEMPGFSEPVNIITAMRETQNNLMELLSSEFKFTENIKKINSGFEDAEKQFSYNGLVKPLFLSPSVKKMLWQTLKLVKEISHITQAPPKKIFIEMAKGAELEPARTKTRLKILQDLYSSCKNDADAFSSEIQYLSGKIENEDNLRLRSDKLYLYYTQLGKCMYCGKPIEIGHVFDTSNYDIDHIYPQSKIKDDSISNRVLVCSSCNKNKEDKYPLKAEIQSKQRGFWNFLQRNNFISLEKLNRLTRTSPISDDETAKFIARQLVETRQATKVAAKVLEKMFPETKIVYSKAETVSMFRNKFDIIKCREINDFHHAHDAYLNIVVGNVYNTKFTNNPWNFIKEKRDNPKIADTYNYYKVFDYDVKRNNITAWEKGKTIITVKDMLKRNTPIYTRQAACKKGELFNQTIMKKGLGQHPLKKEGPLSNISKYGGYNKVSAAYYTLIEYEEKGSKIRSLETIPLYLVKDIQKNKDGLKSYLTDQIGKKEIKILIPKIKINSLLKINGFPCHITGKMGEAFVLRPAVQFCCSNDEALYFKKIIRFNEIRKQREKMGKTISPYEDLSFRSYIKDNLCKKTKADEIEEKEFYDLLQKKNLEIYDMLLTKHKDTIYKKRPNSATIDILVKGKEKFKSLIIENQFEVILEILKLFSATRNVSDLQHIGGSKNAGNARVGNKISSLDNCILIYQSITGIFEKRIDLLKI

SEQ ID NO: 1331 - protein, 1395 aa, Treponema denticola
MKKEIKDYFLGLDVGTGSVGWAVTDTDYKLLKANRKDLWGMRCFETAETAEVRRLHRGARRRIERRKKRIKLLQELFSQEIAKIDEGFFQRMKESPLYAEDKTILQENTLFNDKDFTDKTYHKAYPTINHLIKAWIENKVKPDPRLLYLACHNIIKKRGHFLFEGDFDSENQFDTSIQALFEYLREDMEVDIDADSQKVKEILKDSSLKNSEKQSRLNKMLGLKPSDKQKKAITNLISGNKINFADLYDNPDLKDAEKNSISFSKDDFDALSDDLASILGDSFELLLKAKAVYNCSVLSKVIGDEQYLSFAKVKIYEKHKTDLTKLKNVIKKHFPKDYKKVFGYNKNEKNNNNYSGYVGVCKTKSKKLIINNSVNQEDFYKFLKTILSAKSEIKEVNDILTEIETGTFLPKQISKSNAEIPYQLRKMELEKILSNAEKHFSFLKQKDEKGLSHSEKIIMLLTFKIPYYIGPINDNHKKSFPDRCWVVKKEKSPSGKTTPWNFFDHIDKEKTAEEFITSRTNFCTYLIGESVLPKNSLLYSEYTVLNEINNLQIIIDGKNICDTKLKQKIYEELFKKYKKITQKQISTFIKHEGICNKTDEVIILGIDKECTSSLKSYIELKNIFGKQVDEISTKNMLEEIIRWATIYDEGEGKTILKTKIKAEYGKYCSDEQIKKILNLKFSGWGRLSRKFLETVTSEMPGFSEPVNIITAMRETQNNLMELLSSEFKFTENIKKINSGFEDVEKQFSYDGLVKPLFLSPSVKKMLWQTLKLVKEISHITQAPPKKIFIEMAKGAELDPVRTKTRLKILQDLYNNCKNDADAFSSEIKDLSGKIENEDNLRLRSDKLYLYYTQLGKCMYCGKPIEIGHVFDTSNYDIDHIYPQSKIKDDSISNRVLVCSSCNKNKEDKYPLKAEIQSKQRGFWNFLQRNNFISLEKFNRLTRATPISDDETAKFIARQLVETRQATKVAARVLEKMFPETKIVYSKAETVSMFRNKFDIVKCREINDFHHAHDAYLNIVVGNVYNTKFTNNLWNFIKEKRDNPKIADTYNYYKVFDYDVKRNNITAWEKGKTIITVKDMLKRNTPIYTRQAACKKGGLFDQTIMKKGLGQHPLKKEGPFSNISKYGGYNKVSAAYYTLIEYEEKGNKIRSLETIPLYLVKDIQKDQDVLKSYLTDLLGKKEFKILVPKIKINSLLKINGFPCHITGKTNDSFLLRPAVQFCCSNDEVLYFKKIIRFSEIRSQREKIGKTISPYEDLSFRSYIKENLCKKTKNDEIGEKEFYDLLQKKNLEIYDMLLTKHKDTIYKKRPNSATIDILVKGKEKFKSLIIENQFEVILEILKLFSATRNVSDLQHIGGSKYSGVAKIGNKISSLDNCILIYQSITGIFEKRIDLLKV

SEQ ID NO: 1332 - protein, 357 aa, Treponema denticola
MKKEIKDYFLGLDVGTGSVGWAVTDTDYKLLKANRKDLWGMRCFETAETAEVRRLHRGARRRIERRKKRIKLLQELFSQEIAKTDEGFFQRMKESPFYAEDKTILQENALFNDRDFTDKTYHKAYPTINHLIKAWIENKVKPDPRLLYLACHNIIKKRGHFLFEGDFDSENQFDTSIQAFFEYLREDMEVDIDADSQKIKEILKDSSLKNSEKQSRLNKILGLKSSDKQKKAITNLISGNKINFADLYDNPDLKDAEKNSISFSKDDFDALSDDLASILGDSFELLLKAKAVYNCSVLSKVIGDEQYLSFAKVKIYEKHKTDLTKLKNVIKKHFPKDYKKVFGYNKNEKITTITPDM

SEQ ID NO: 1333 - protein, 1395 aa, Treponema denticola
MKKEIKDYFLGLDVGTGSVGWAVTDTDYKLLKANRKDLWGMRCFETAETAEVRRLHRGARRRIERRKKRIKLLQELFSQEIAKTDEGFFQRMKESPFYAEDKTILQENALFNDRDFTDKTYHKAYPTINHLIKAWIENKVKPDPRLLYLACHNIIKKRGHFLFEGDFDSENQFDTSIQALFEYLREDMEVDIDADSQKVKEILKDSSLKNSEKQSRLNKMLGLKPSDKQKKAITNLISGNKINFADLYDNPDLKDAEKNSISFSKDDFDALSDDLASILGDSFELLLKAKAVYNCSVLSKVIGDEQYLSFAKVKIYEKHKTDLTKLKNVIKKHFPNDYKKVFGYNKNEKNNNNYSAYVGVCKTKSKKLVINNTVNQEDFYKFLKPILLAKSEIKEVNDILTEIETGTFLPKQISKSNAEIPYQLRKMELEKILSNAEKHFSFLKQKDEKGLSHSEKIIMLLTFKIPYYIGPINDNHKKSFPDRCWVIKKEKSPSGKTTPWNFFDHIDKDKTAEAFITSRTNFCTYLVGESVLPKNSLLYSEYTVLNEINNLQIIIDGKNICDIKLKQKIYEELFKKYKKITQKQISTFIKHEGICNKTDEVIILGIDKECTSSLKSYIELKNIFGKQVDEISTKNMLEEIIRWATIYDEGEGKTILKTKIKAEYGKYCSDEQIKKILNLKFSGWGRLSRKFLETVTSEMPGFSEPVNIITAMRETQNNLMELLSSEFKFTENIKKINSGFEDVEKQFSYDSLVKPLFLSPSVKKMLWQTLKLVKEISHITQAPPKKIFIEMAKGAELDPVRTKTRLKILQDLYNNCKNDADAFSSEIKDLSGKIENEDNLRLRSDKLYLYYTQLGKCMYCGKPIEIGHVFDTSNYDIDHIYPQSKIKDDSISNRVLVCSSCNKNKEDKYPLKAEIQSKQRGFWNFLQRNNFISLEKLNRLTRTSPISDDETAKFIARQLVETRQATKVAAKVLEKMFPETKIVYSKAETVSMFRNKFDIIKCREINDFHHAHDAYLNIVVGNVYNTKFTNNPWNFIKEKRDNPKIADTYNYYKVFDYDVKRNNITAWEKGKTIITVKDMLKRNTPIYTRQAACKKGELFNQTIMKKGLGQHPLKKEGPLSNISKYGGYNKVSAAYYTLIEYEEKGSKIRSLETIPLYLVKDIQKNKDGLKSYLTDQIGKKEIKILIPKIKINSLLKINGFPCHITGKMGEAFVLRPAVQFCCSNDEALYFKKIIRFNEIRKQREKMGKTISPYEDLSFRSYIKDNLCKKTKADEIEEKEFYDLLQKKNLEIYDMLLTKHKDTIYKKRPNSATIDILVKGKEKFKSLIIENQFEVILEILKLFSATRNVSDLQHIGGSKNAGNARVGNKISSLDNCILIYQSITGIFEKRIDLLKI

SEQ ID NO: 1334 - protein, 631 aa, Treponema denticola
MLWQTLKLVKEISHITQAPPKKIFIEMAKGAELEPARTKTRLKILQDLYNNCKNDADAFSSEIKDLSGKIENEDNLRLRSDKLYLYYTQLGKCMYCGKPIEIGHVFDTSNYDIDHIYPQSKIKDDSISNRVLVCSSCNKNKEDKYPLRSEIQSKQRGFWNFLQRNNFISLEKLNRLTRTTPISDDETAKFIARQLVETRQATKVAAKVLEKMFPETKIVYSKAETVSMFRNKFDIVKCREINDFHHAHDAYLNIVVGNIYNTKFTNNPWNFIKEKRDNPKIADTYNYYKVFDYDVKRNNITAWEKGKTIITVKDMLKRNTPIYTRQAACKKGGLFDQTIMKKGLGQHPLKKEGPFSNISKYGGYNKVSAAYYTLIEYEEKENKIRSLETIPLYLVKDIQKSQEKLKSYLTDLLGKKEIKILVPKIKINSLLKINGFPCHITGKTNDSFLLRPAVQFCCSNDEVLYFKKIIRFNEIRSQREKMGKTISPYEDLSFRSYIKENLCKKTKNDEIGEKEFYDLLQKKNLEIYDMLLTKHKDTIYNKRPNSTTLGMLTKGRYEFINLKPKDQIIVMLEILKLFCTTREAIDLGLIKGKPAAGVATLGKKISNLDNCILIYQSITGIFEKRIDLLKV

SEQ ID NO: 1335 - protein, 631 aa, Treponema denticola
MLWQTLKLVKEISHITQAPPKKIFIEMAKGAELEPARTKTRLKILQDLYSSCKNDADAFSSEIQYLSGKIENEDNLRLRSDKLYLYYTQLGKCMYCGKPIEIGHVFDTSNYDIDHIYPQSKIKDDSISNRVLVCSSCNKNKEDKYPLKSEIQSKQRGFWNFLQRNNFISLEKLNRLTRTTPISDDETAKFIARQLVETRQATKVAAKVLEKMFPETKIVYSKAETVSMFRNKFDIIKCREINDFHHAHDAYLNIVVGNVYNTKFTNNPWNFIKEKRDNPKIADTYNYYKVFDYDVKRNNITAWEKGKTIITVKDMLKRNTPIYTRQAACKKGELFNQTIMKKGLGQHPLKKEGPFSNISKYGGYNKVSAAYYTLIEYEEKVNKIRSLETIPLYLVKDIQKDQDVLKSYLTDLLGKKEIKILVPKIKINSLLKINGFPCHITGKTGDSFVLRPAVQFCCSNDEVLYFKKIIRFNEIRSQREKMGKTISPYEDLSFRSYIKENLCKKTKADEIGEKEFYDLLQKKNLEIYDMLLTKHKDTIYNKRPNSTTLGMLTKGRYEFINLKPKDQIIVMLEILKLFCTTREAIDLGLIKGKPAAGVATLGKKISNLDNCILIYQSITGIFEKRIDLLKV

SEQ ID NO: 1336 - protein, 370 aa, Treponema denticola
MTEIETGTFLPKQISKSNAEIPYQLRKMELEKILSNAEKHFSFLKQKDEKGLSHSEKIIMLLTFKIPYYIGPINDNHKKSFPDRCWVVKKEKSPSGKTTPWNFFDHIDKEKTAEEFITSRTNFCTYLVGESVLPKSSLLYSEYTVLNEINNLQIIIDGKNICDIKLKQKIYEELFKKYKKITQKQISTFIKHEGICNKTDEVIILGIDKECTSSLKSYIELKNIFGKQVDEISTKNMLEDIIRWAAIYDEGEGKTILKTKIKAEYGKYCSDEQIKKILNLKFSGWGRLSRKFLETVTSEMPGFSEPVNIITAMRETQNNLMELLSSEFKFTENIKKINSGFEDVEKQFSYDGLVKPLFLSPSVKKCCGRL

SEQ ID NO: 1337 - protein, 591 aa, Treponema phagedenis
MARGKEAEKGRTSSRYASIKALYENCKQDLADYDAVLEQFKSEEPLRLRSDKLYLYYTQLGRCMYTGRVIDIDRLMSDNSAYDIDHIYPRSKIKDDSLTNRVLVVKDANQDKRDEPLSPQIQDKQKGFWDFLKHNNFISIEKYERLTYRGYFTEEMLSGFIARQLVETRQGTKTAGQILEQLYPDSTVVYCKAANTSEFRQKFNLIKCREINDLHHAHDAYLNIAVGNVYYTKFTSNPRNFMKLKEPYNLRELFDRDVERNNTIAWVKNKTITTIKDMLKRNTPLYTRYAYCKTGGFFDQNIMKKGKGQFPLKENSPLSDISKYGGYNKVSGAYFILVQKKEKDAVVRILETVPLYLLNKPGKESENVREYLSTALGTKDFKILIPKIKINSLFKINGFLVHITGKTNDRFLVRSAVQFFCDDNLTLFFKRIIAFNGLRNLNKDKSMTAYDDNTMRVYVRGNLFKDKNQLFDKNKFNEIVKGKNISVYKDMVKRYETSIYKFRPNTAVIPILKSGEDKFINLPIEEQFKILQEILKLFGAINGTANLTLIGGRPSTGEMKISNNISNLKQCILIHQSPTGVFEQQIDLLKI

SEQ ID NO: 1338 - protein, 1062 aa, Unknown
  Treponema sp. JC4
MIMKLEKWRLGLDLGTNSIGWSVFSLDKDNSVQDLIDMGVRIFSDGRDPKTKEPLAVARRTARSQRKLIYRRKLRRKQVFKFLQEQGLFPKTKEECMTLKSLNPYELRIKALDEKLEPYELGRALFNLAVRRGFKSNRKDGSREEVSEKKSPDEIKTQADMQTHLEKAIKENGCRTITEFLYKNQGENGGIRFAPGRMTYYPTRKMYEEEFNLIRSKQEKYYPQVDWDDIYKAIFYQRPLKPQQRGYCIYENDKERTFKAMPCSQKLRILQDIGNLAYYEGGSKKRVELNDNQDKVLYELLNSKDKVTFDQMRKALCLADSNSFNLEENRDFLIGNPTAVKMRSKNRFGKLWDEIPLEEQDLIIETIITADEDDAVYEVIKKYDLTQEQRDFIVKNTILQSGTSMLCKEVSEKLVKRLEEIADLKYHEAVESLGYKFADQTVEKYDLLPYYGKVLPGSTMEIDLSAPETNPEKHYGKISNPTVHVALNQTRVVVNALIKEYGKPSQIAIELSRDLKNNVEKKAEIARKQNQRAKENIAINDTISALYHTAFPGKSFYPNRNDRMKYRLWSELGLGNKCIYCGKGISGAELFTKEIEIEHILPFSRTLLDAESNLTVAHSSCNAFKAERSPFEAFGTNPSGYSWQEIIQRANQLKNTSKKNKFSPNAMDSFEKDSSFIARQLSDNQYIAKAALRYLKCLVENPSDVWTTNGSMTKLLRDKWEMDSILCRKFTEKEVALLGLKPEQIGNYKKNRFDHRHHAIDAVVIGLTDRSMVQKLATKNSHKGNRIEIPEFPILRSDLIEKVKNIVVSFKPDHGAEGKLSKETLLGKIKLHGKETFVCRENIVSLSEKNLDDIVDEKIKSKVKDYVAKHKGQKIEAVLSDFSKENGIKKVRCVNRVQTPIEITSGKISRYLSPEDYFAAVIWEIPGEKKTFKAQYIRRNEVEKNSKGLNVVKPAVLENGKPHPAAKQVCLLHKDDYLEFSDKGKMYFCRIAGYAATNNKLDIRPVYAVSYCADWINSTNETMLTGYWKPTPTQNWVSVNVLFDKQKARLVTVSPIGRVFRK

SEQ ID NO: 1339 - protein, 281 aa, Treponema vincentii
MKTLGLDIGTNSIGWGIVDETANKIEDCGVYIFPEGVKKEKGNESSKAAERTSFRLARRLKFRRKLRKCETLKVLIKNKMCPLTMEELEKWRKQKIYPVSQDFLNWYRTDELKNWEPYFLRKKCAEQKAGPYEIGRALYHLAQRRGFLSNRKESTKASDGKVSKSIDELSSLMDGRTLGQYFYELKQSGEKVRGKYTSRKEHYEKEFNKICEVQEISPELKDDLYRAIFFQRKLKSQKFLVGKCTFERNKPRAPISHFEFEEFRMLSFINSIKIAKKLRRR

SEQ ID NO: 1340 - protein, 675 aa, Unknown
  uncultured bacterium T3_7_42578
MTAENYSNVRFAFDIGTNSIGWAVFQLNDKQEATSILNAGARIFSDGRDPKTFEPLAVRRRNVRSASRMRDRYLRRRKRTLDKLIGYGLLPEDKAERDKILLETNDKPSGSTDKKTDPYSLRARALEEKLPLAYVARALFHIGQRRGFKSNRKADRKSNEKGKIAAGIEELSGLMHQSHAPTLGAYLAKRREEGHVVRLRASSEALTNKAYAFYPERAMLEDEFHKIWQAQAEYYPDVLTKEREEELFHVMFFQRPLKEQKVGLCTLVEGELRLPKSDPLFQQFRLYKEINELAIILPDLSQRKLTMEERDTLITLMRPAKTKTFAALRKALKIPAGGRFNKETENRKQLTGDEVYSVFSKPELFGGDWAKFSIEQQREIIDQLNNEENPDKLEEWLKNKFPKLSDEQRSEIINANLPDGYGRFGITATSKILEQLKKDVISEAEAAHRCGFDHSLANRNWKGLDELPRYQEVLERHIVPGTGDKNDIYDIYKGRLTNPTVHIGLNQVRRLTNRLIKAYGKPWQIVVELARDLPMSSEERKEHNKTLNDNIKAGFERTQKLERLGQKDNANNRLLLKLWEELGKDPDDRKSIYSGTRITEPMLFSGEVEIDHILPFSLTYDDSYANKILCLREENRIKRNRAPADVTEWKDRYDEIIGRSKNCQRTNKNVLGPMQ

SEQ ID NO: 1341 - protein, 1017 aa, Unknown
  uncultured bacterium
MRVDSLGRCLSDEEWARVIYHLCKHRGFHWISRAEAKQTEGDSKSEGGKVKQGLAGTAKLMDEKGYRSAAEMVLAEFPEAQRNKQGEYRKALSRELLAKELALLFARQRVFGNRHATDTLETAILGNSDKKSGLFWQQKPALAGADLLKMLGTCTFEKNEYRAPKASFTAERHVWLTRLNNLRIVTDGITRQLTEQERQLVLPLPYRQAGDLTYKQLGMALTKAGLLEAGCFKFIGLAYPTEAQKAEGKTKDPESATLVKIPAWQELRQTLNKASLNDEWEKLSGDALCGQPEIFDKIAWILSVYKDDDEVRTELAKLVLPNPEGLTEALLNIRFDKFHALSLKALRAIVPHMEKGLRYDEACVQAGYHHSQLHKIGEGEHKYLPPLYDGRDGDGRMIFAEDADIPRNPVVLRSLNQARKVVNAIIRRYGSPSAVHIEMARDLSRPFDERNKIKKDQDEYQARNQRDREQFIELFGHPPKGLEFEKWRLYREQNGQCAYSQKPLASSGDVAEIFLDGSTEIDHALPYSRSFDDSKNNKVLVLTRENRDKGNRTPYEYLGGAENSERWQRFFSFVESNKAYRLAKRTRLLRKDFGAKESEEFRERNLNDTRYVCRFFKNYVEQHLKLAEGSEAKRCVVVSGQLTNFLRTRWGLLKIRSDSDRHHALDAAVVAACSHSMVQRLSNYSRTRELEQVRDGFVNIETGEIVNPAMHQQLREHFPDPWPYFRHELEARLKIDSPALLREEMARLSSYTEEELAALKPLFVSRAPQRRNGGAAHKDTIYGQPEKLKKNGSVSQKVALASLALKDIDLLADPHRNAKLYGAIRERLEAHGGKGDKAFPATNPLRKPDKEGNPTGPIVRTVTKVIDKLSGIPVRGGIAKNDTMLRVDVFTKAGRFHLVPVYVHHRVTGLPNQAITRGKDENQWAIIDDTFEWRFSLYPNDLVQIRLKDETHLGYYASTDRSTSSISIWAHDRNQSVGKDGLIRSIGVTTAKDIEKFHVDTLGNVYPAPPEKRRGLA

SEQ ID NO: 1342 - protein, 600 aa, Unknown
  uncultured bacterium
VNAIIKKHGSLSAVHIEMARDLSRPLDERREVKKLQEEFKDRNDKARESFEADHGYRPKGIVFEKWMLYREQHGKCAYSMEGLDIDRVLNDANYAQIDHALPYSRSYDDSKNNKVLVLTRENQNKGNRTAYEYLTSFAGGEDGDRWRNYAAWVNSNKSYRMAKRNRLLRKNYGPDEASGFKDRNLNDTRYICKFFKNYVEEHLQLAPRADGNANKRCVVVNGQLTAFLRARWGLSKVRSESDRHHALDAAVVAACSHGMVKALADYARNKEVAYLREGFPDPETGEIINPEAHARGVHHFPEPWAHFRHELQVRLYSDDLQALREDLQRLGTYSEQDLLGVRTLFVSRAPQRRNDGAVHKETIYAQPEALRKQGGVVQKVPLTSLSLKDLDNLADPHRNAKLYTALRARLEAHGGKADKAFGPDQPFYKPDKNGNPTGPIVRTIKLVIDKLSGIPIRGGVAKNDTMLRVDVFTKAGKFHLVPVYVHHRVTGLPDRAIVAFKDEVEWTQVDDSFKFLFSIHPNDLIRIGLKAKEPMIGYFASCHRGTGAFNVWSHDRNTSVGKSGSVEGIGIKTALSLEKLNIDVLGNVYPARPEQRHGLA

SEQ ID NO: 1343 - protein, 1011 aa, Unknown
  uncultured delta proteobacterium HF0070_07E19
MSSKAIDSLEQLDLFKPQEYTLGLDLGIKSIGWAILSGERIANAGVYLFETAEELNSTGNKLISKAAERGRKRRIRRMLDRKARRGRHIRYLLEREGLPTDELEEVVVHQSNRTLWDVRAEAVERKLTKQELAAVLFHLVRHRGYFPNTKKLPPDDESDSADEEQGKINRATSRLREELKASDCKTIGQFLAQNRDRQRNREGDYSNLMARKLVFEEALQILAFQRKQGHELSKDFEKTYLDVLMGQRSGRSPKLGNCSLIPSELRAPSSAPSTEWFKFLQNLGNLQISNAYREEWSIDAPRRAQIIDACSQRSTSSYWQIRRDFQIPDEYRFNLVNYERRDPDVDLQEYLQQQERKTLANFRNWKQLEKIIGTGHPIQTLDEAARLITLIKDDEKLSDQLADLLPEASDKAITQLCELDFTTAAKISLEAMYRILPHMNQGMGFFDACQQESLPEIGVPPAGDRVPPFDEMYNPVVNRVLSQSRKLINAVIDEYGMPAKIRVELARDLGKGRELRERIKLDQLDKSKQNDQRAEDFRAEFQQAPRGDQSLRYRLWKEQNCTCPYSGRMIPVNSVLSEDTQIDHILPISQSFDNSLSNKVLCFTEENAQKSNRTPFEYLDAADFQRLEAISGNWPEAKRNKLLHKSFGKVAEEWKSRALNDTRYLTSALADHLRHHLPDSKIQTVNGRITGYLRKQWGLEKDRDKHTHHAVDAIVVACTTPAIVQQVTLYHQDIRRYKKLGEKRPTPWPETFRQDVLDVEEEIFITRQPKKVSGGIQTKDTLRKHRSKPDRQRVALTKVKLADLERLVEKDASNRNLYEHLKQCLEESGDQPTKAFKAPFYMPSGPEAKQRPILSKVTLLREKPEPPKQLTELSGGRRYDSMAQGRLDIYRYKPGGKRKDEYRVVLQRMIDLMRGEENVHVFQKGVPYDQGPEIEQNYTFLFSLYFDDLVEFQRSADSEVIRGYYRTFNIANGQLKISTYLEGRQDFDFFGANRLAHFAKVQVNLLGKVIK

SEQ ID NO: 1344 - protein, 1011 aa, Unknown; identical to SEQ ID NO: 1343
  uncultured delta proteobacterium HF0070_07E19

SEQ ID NO: 1345 - protein, 1120 aa, Unknown
  Veillonella sp. oral taxon 780 str. F0422
MGFKANLVNLFTDEDIEVILPEEKEFKSINLHEGIYEDVRDAYEDAWGDRFAIVDQCKVLHDIIVISSIIKPGQSLSEAKIESYNQHKEDLVLLKSVLKEDRKLYDDMFVVDTDKGTNYVKYTKQGVNGNTSATQEEFYKYVRKVVSVLPETEHTRRIVQKLEEGTFLPLQRISKNGVVPYQLHKEELVRILDKATVNFPFLNKVENGLTVADKIISILEFKIPYYVGPLNPTHSIENGGFAWVVRKEAGQVLPWNFEQKVDVQASAVKFIENLTNKCTYLIDQDVLPKYSLLYAEFSLLNELNNIRVNDKPLPADVKQAFIRDHFISLQDSKTATKKVVAKYLVDNNYVSQPPIITGMDQQIATKLTSHRDMTRILGEHFDHAMAEDIIRYITIFGESKDMLRQVLKNYYGDRLTTEQIKKLGKLTYTGWGRLSKKFLSDIWGMKKNDDDAEAGTIIEHMREGQENLMQLLSSSYSFIDVVQEYVTNVLGEKEKTAFEMLEDLSLSPMVKRSVWQTLRILDEIVSIRKELPKKIFVEVARTNKADKKRTQSRKALLEELYKQIKDEDVHVLQQELESKEDSALNSKKLYLYFTQMGRCMYSGRRIDIHELFTDKYDIDHIYPRSLTKDDSWHNIVLVEKQLNAEKTDRFPILSAIQSKQKGFWKLLWDRGFISEKKYDRLVRTTDLTDEELNQFINRQMVSTNQSVKAVTTLLHQLYPETEVVFSKAENVSDFRHDYDFVKVRSINHHHHAKDAYLNIVVGNVYHEKFTKNFLSFAKQKGTRRTYNLTKIFEYEIKLTEESKKVIWDPNIHMDIVKKMMKSNDVRVTQRAVPQKGGLSDETIYKKGIAKRGVYLPLKSSDERVRDVEKYGGRTSITISEYIILNIRDTSDQDRIEIFSLPLYIAGKKDIHKAIEEAYLSTCKKPASVVDIQILYRGLYIGSKVNINGFTYYMGGKTGSNVSIDSAVDVVMDITSSVYIKLLEKVAIKKIENPKTFRIENIKTSYNHKEVTVSKEQNIALYQELLKKLDTPLFSKMKGNKLEEFRTVGFDTFIALSLEEQASVLLEVLNVLTNFKTKRDITKIGMTSSRSTLGINISNTEQFSVITTSITGLYEQEIKIK

SEQ ID NO: 1346 - protein, 983 aa, Verminephrobacter aporrectodeae
MRRRRDRLLKRKARMHDQLMRHGFFPADAAGRKVLERLNPYQLRAKGLHQALTPGEFARALFHINQRRGFQSNRKTDRKDNESGALKQAISELRAQIHDSGCATVGEWFWKERMQQKPEGVHRQGVRARYRETPYTTDEGRQRIDKRYDLYVDRAMIEQEFDALWAVQAALQPGLFTDAACKELRYTLLFQRKLRPVKPGRCTLLPEEERAPLALPSTQRFRILQEVNHLRLLDEALREVPLTLAQRDALVAALESQGKLGFAPMRKLLKLPGTVKFNLEDEKRTELKGNATSAILARKDLFGPAWAGFDAALQDEIVWQLVSEEGEGRLIAWLQQHTGVDEARAEAIADTSLPEGYGSLSRKALERIVPALQREVCSYDKAVQAAGFAHHSDLGFDFEHSGDEVQQVGERIIASTGEVRPLFAFKQLPYYGKALQRHVAFGSGKPEDPEEKRHGKIANPTVHIGLNQVRTVVNALIRRYGRPSEVVVELARDLKQSREQQQETQRKQAENQRRNTRIRERIAETLGISPERVRSSDIQKWILWEELSFDVVDRRCPYSGEQISTTMLLSPKVEIEHILPFSQTLDDSLNNRTVALREANRIKRNRTPWDARADFEARGWSYEGILHRAERMPLRKRYRFAPDGYQRWLGEDKDFLARALNDTRYLSRVAANYLRLVCPKPQGVRVIPGRMTAMLRAKFGLNDVLGLDGEKNRNDHRHHAVDACVIGVTDQGLMQRFARASAQAREDGLTRLVQDMPLPWPSYRDHVERAVRHIWVSHKPDHGFEGAMMEETAYGIRKDGSIKPRRKADGSAGREVVNLIRITESRQPVRHGVDSQGQPLPYKGYVGGSNYCIEITANDQGKWEGAVISTFEAYRIVRASGWGRLRHCSHGQNGRPLMMRLMIGDAVRLALDGSEKTMRVVKISANGQVFLVAPNEANVDARNRDKADPFAYVSKKAGSFQSAKARQVSISPIGELRDPGFKG

SEQ ID NO: 1347 - RNA, 94 nt, artificial  sequence
  Synthetic nucleic acid sequence
guuuucccuuuucaaagaaaucuccugggcaccuaucuucuuaggugcccucccuuguuuaaaccugaccaguuaaccggcugguuagguuuuu

SEQ ID NO: 1348 - RNA, 22 nt, artificial  sequence
  Synthetic nucleic acid sequence
gagauuuaugaaaagggaaaac

SEQ ID NO: 1349 - RNA, 36 nt, artificial  sequence
  Synthetic nucleic acid sequence
uaaucccacagccgccaguuccgcuggcggcauuuu

SEQ ID NO: 1350 - DNA, 10 bp, artificial  sequence
  Synthetic nucleic acid sequence
aagccaaaaa

SEQ ID NO: 1351 - DNA, 15 bp, artificial  sequence
  Synthetic nucleic acid sequence
tcttcattgcgctta

SEQ ID NO: 1352 - RNA, 73 nt, artificial  sequence
  Synthetic nucleic acid sequence
aacagcauagcaaguuaaaauaaggcuaguccguuaucaacuugaaaaguggcaccgagucggugcuuuuuuu

SEQ ID NO: 1353 - DNA, 20 bp, artificial  sequence
  Synthetic nucleic acid sequence
gcagcagaagaagcctttgt

SEQ ID NO: 1354 - DNA, 20 bp, artificial  sequence
  Synthetic nucleic acid sequence
ttcctcctctccctcctctc

SEQ ID NO: 1355 - RNA, 125 nt, artificial  sequence
  Synthetic nucleic acid sequence
  misc_feature (13)..(112): n at each of these positions can be present or absent such that this region can contain anywhere from 3 to 100 nucleotides. n is a, c, g, or u
guuuuagagcuannnnnnnnnnnnnnnnnnnnnnnnnnnnnnnnnnnnnnnnnnnnnnnnnnnnnnnnnnnnnnnnnnnnnnnnnnnnnnnnnnnnnnnnnnnnnnnnnnnnuagcaaguuaaaa

SEQ ID NO: 1356 - RNA, 123 nt, artificial  sequence
  Synthetic nucleic acid sequence
  misc_feature (12)..(111): n at each of these positions can be present or absent such that this region can contain anywhere from 3 to 100 nucleotides. n is a, c, g, or u
guuuagagcugnnnnnnnnnnnnnnnnnnnnnnnnnnnnnnnnnnnnnnnnnnnnnnnnnnnnnnnnnnnnnnnnnnnnnnnnnnnnnnnnnnnnnnnnnnnnnnnnnnnncagcaaguuaaa

SEQ ID NO: 1357 - RNA, 124 nt, artificial  sequence
  Synthetic nucleic acid sequence
  misc_feature (13)..(112): n at each of these positions can be present or absent such that this region can contain anywhere from 3 to 100 nucleotides. n is a, c, g, or u
guuuuagagcugnnnnnnnnnnnnnnnnnnnnnnnnnnnnnnnnnnnnnnnnnnnnnnnnnnnnnnnnnnnnnnnnnnnnnnnnnnnnnnnnnnnnnnnnnnnnnnnnnnnncagcgaguuaaa

SEQ ID NO: 1358 - RNA, 128 nt, artificial  sequence
  Synthetic nucleic acid sequence
  misc_feature (14)..(113): n at each of these positions can be present or absent such that this region can contain anywhere from 3 to 100 nucleotides. n is a, c, g, or u
guuuuuguacucunnnnnnnnnnnnnnnnnnnnnnnnnnnnnnnnnnnnnnnnnnnnnnnnnnnnnnnnnnnnnnnnnnnnnnnnnnnnnnnnnnnnnnnnnnnnnnnnnnnnagaagcuacaaagau

SEQ ID NO: 1359 - RNA, 122 nt, artificial  sequence
  Synthetic nucleic acid sequence
  misc_feature (12)..(111): n at each of these positions can be present or absent such that this region can contain anywhere from 3 to 100 nucleotides. n is a, c, g, or u
guuguagcuccnnnnnnnnnnnnnnnnnnnnnnnnnnnnnnnnnnnnnnnnnnnnnnnnnnnnnnnnnnnnnnnnnnnnnnnnnnnnnnnnnnnnnnnnnnnnnnnnnnnnguugcuacaau

SEQ ID NO: 1360 - RNA, 42 nt, artificial  sequence
  Synthetic nucleic acid sequence
guuuuagagcuagaaauagcaaguuaaaauaaggcuaguccg

SEQ ID NO: 1361 - RNA, 55 nt, artificial  sequence
  Synthetic nucleic acid sequence
cucaccuuccuacggucacuauucaccuuacgguacacccgacaguuuuaacucg

SEQ ID NO: 1362 - RNA, 55 nt, artificial  sequence
  Synthetic nucleic acid sequence
uugcacgacgccgaccgaccacuugaaggcuaucacgcccacaacuuacuaaagg

SEQ ID NO: 1363 - RNA, 55 nt, artificial  sequence
  Synthetic nucleic acid sequence
aguguuguuacucaccgucuauaucggaccaccaaguccgccgcguaaaaauaac

SEQ ID NO: 1364 - protein, 34 aa, artificial  sequence
  Synthetic amino acid sequence
IPYYVGPLARGNSRFAWMTRKSEETITPWNFEEV

SEQ ID NO: 1365 - protein, 34 aa, artificial  sequence
  Synthetic amino acid sequence
IPYYVGPLARGNSDFAWSIRKRNEKITPWNFEDV

SEQ ID NO: 1366 - protein, 34 aa, artificial  sequence
  Synthetic amino acid sequence
IPYFVGPLANGQSEFAWLTRKADGEIRPWNIEEK

SEQ ID NO: 1367 - protein, 34 aa, artificial  sequence
  Synthetic amino acid sequence
IPYYIGPLAREKSDFAWMTRKTDDSIRPWNFEDL

SEQ ID NO: 1368 - protein, 34 aa, artificial  sequence
  Synthetic amino acid sequence
IPYYVGPLARGKSDFAWLSRKSADKITPWNFDEI

SEQ ID NO: 1369 - protein, 36 aa, artificial  sequence
  Synthetic amino acid sequence
IPYYVGPLAKKQENSPFAWLIRKSEEKIKPWNLPEI

SEQ ID NO: 1370 - protein, 26 aa, artificial  sequence
  Synthetic amino acid sequence
RNSDKLIARKKDWDPKKYGGFDSPTV

SEQ ID NO: 1371 - protein, 39 aa, artificial  sequence
  Synthetic amino acid sequence
GLFNANLSSKPKPNSNENLVGAKEYLDPKKYGGYAGISN

SEQ ID NO: 1372 - protein, 26 aa, artificial  sequence
  Synthetic amino acid sequence
GNSSKLIPRKTNWDPMKYGGLDSPNM

SEQ ID NO: 1373 - protein, 29 aa, artificial  sequence
  Synthetic amino acid sequence
GNSDKLIPRKTKDIYLDPKKYGGFDSPIV

SEQ ID NO: 1374 - protein, 29 aa, artificial  sequence
  Synthetic amino acid sequence
GNSDKLIPRKTKKFYWDTKKYGGFDSPIV

SEQ ID NO: 1375 - protein, 26 aa, artificial  sequence
  Synthetic amino acid sequence
KDSSKLLPRKNNWDPAKYGGLGSPNV

SEQ ID NO: 1376 - protein, 7 aa, artificial  sequence
  Synthetic amino acid sequence
SRVAPDP

SEQ ID NO: 1377 - protein, 7 aa, artificial  sequence
  Synthetic amino acid sequence
SGDAVQK

SEQ ID NO: 1378 - protein, 7 aa, artificial  sequence
  Synthetic amino acid sequence
ALKDFSH

SEQ ID NO: 1379 - protein, 39 aa, artificial  sequence
  Synthetic amino acid sequence
FPDRCWVVKKEKSPSGKTTPWNFFDHIDKEKTAEEFITS

SEQ ID NO: 1380 - protein, 32 aa, artificial  sequence
  Synthetic amino acid sequence
AWSIRKRNEKITPWNFEDVIDKESSAEAFINR

SEQ ID NO: 1381 - protein, 32 aa, artificial  sequence
  Synthetic amino acid sequence
AWLSRKSADKITPWNFDEIVDKESSAEAFINR

SEQ ID NO: 1382 - protein, 32 aa, artificial  sequence
  Synthetic amino acid sequence
AWMTRKTDDSIRPWNFEDLVDKEKSAEAFIHR

SEQ ID NO: 1383 - protein, 32 aa, artificial  sequence
  Synthetic amino acid sequence
AWMTRKSEETITPWNFEEVVDKGASAQSFIER

SEQ ID NO: 1384 - protein, 33 aa, artificial  sequence
  Synthetic amino acid sequence
FSKRKKTDSDRDETPFGAIAVRGGFVEIGPSIH

SEQ ID NO: 1385 - protein, 26 aa, artificial  sequence
  Synthetic amino acid sequence
EPFYKYDKAGNRTQQVKAVRVEQVQK

SEQ ID NO: 1386 - protein, 14 aa, artificial  sequence
  Synthetic amino acid sequence
SYGGKEGVLKALEL

SEQ ID NO: 1387 - protein, 37 aa, artificial  sequence
  Synthetic amino acid sequence
LGQHPLKKEGPFSNISKYGGYNKVSAAYYTLIEYEEK

SEQ ID NO: 1388 - protein, 37 aa, artificial  sequence
  Synthetic amino acid sequence
NSNENLVGAKEYLDPKKYGGYAGISNSFTVLVKGTIE

SEQ ID NO: 1389 - protein, 39 aa, artificial  sequence
  Synthetic amino acid sequence
NSDKLIPRKTKKFYWDTKKYGGFDSPIVAYSILVIADIE

SEQ ID NO: 1390 - protein, 39 aa, artificial  sequence
  Synthetic amino acid sequence
NSDKLIPRKTKDIYLDPKKYGGFDSPIVAYSVLVVADIK

SEQ ID NO: 1391 - protein, 36 aa, artificial  sequence
  Synthetic amino acid sequence
NSDKLIARKKDWDPKKYGGFDSPTVAYSVLVVAKVE

SEQ ID NO: 1392 - DNA, 23 bp, Artificial Sequence
  Synthetic oligonucleotide
ggcgcataaagatgagacgctgg

SEQ ID NO: 1393 - DNA, 23 bp, Artificial Sequence
  Synthetic oligonucleotide
ccagcgtctcatctttatgcgcc

SEQ ID NO: 1394 - DNA, 23 bp, Artificial Sequence
  Synthetic oligonucleotide
gtgataagtggaatgccatgtgg

SEQ ID NO: 1395 - DNA, 23 bp, Artificial Sequence
  Synthetic oligonucleotide
ccacatggcattccacttatcac

SEQ ID NO: 1396 - DNA, 23 bp, Artificial Sequence
  Synthetic oligonucleotide
ctggtgaacttccgatagtgcgg

SEQ ID NO: 1397 - DNA, 23 bp, Artificial Sequence
  Synthetic oligonucleotide
ccgcactatcggaagttcaccag

SEQ ID NO: 1398 - DNA, 23 bp, Artificial Sequence
  Synthetic oligonucleotide
cagatatagcctggtggttcagg

SEQ ID NO: 1399 - DNA, 23 bp, Artificial Sequence
  Synthetic oligonucleotide
cctgaaccaccaggctatatctg

SEQ ID NO: 1400 - DNA, 23 bp, Artificial Sequence
  Synthetic oligonucleotide
ggcaatgccgatggcgatagtgg

SEQ ID NO: 1401 - DNA, 23 bp, Artificial Sequence
  Synthetic oligonucleotide
ccactatcgccatcggcattgcc

SEQ ID NO: 1402 - DNA, 23 bp, Artificial Sequence
  Synthetic oligonucleotide
ggtgtgaaagaacaccaacaggg

SEQ ID NO: 1403 - DNA, 23 bp, Artificial Sequence
  Synthetic oligonucleotide
ccctgttggtgttctttcacacc

SEQ ID NO: 1404 - DNA, 17 bp, Artificial Sequence
  Synthetic oligonucleotide
taatacgactcactata

SEQ ID NO: 1405 - DNA, 59 bp, Artificial Sequence
  Synthetic oligonucleotide
caaaacagcatagctctaaaacgcgtctcatctttatgcgtctatagtgagtcgtatta

SEQ ID NO: 1406 - RNA, 42 nt, Artificial Sequence
  Synthetic oligonucleotide
gacgcauaaagaugagacgcguuuuagagcuaugcuguuuug

SEQ ID NO: 1407 - RNA, 42 nt, Artificial Sequence
  Synthetic oligonucleotide
gugauaaguggaaugccaugguuuuagagcuaugcuguuuug

SEQ ID NO: 1408 - RNA, 42 nt, Artificial Sequence
  Synthetic oligonucleotide
cuggugaacuuccgauagugguuuuagagcuaugcuguuuug

SEQ ID NO: 1409 - RNA, 42 nt, Artificial Sequence
  Synthetic oligonucleotide
  misc_feature (5)..(5): n is u
  misc_feature (7)..(7): n is u
  misc_feature (12)..(12): n is u
  misc_feature (15)..(15): n is u
  misc_feature (18)..(19): n is u
cagananagccnggnggnncguuuuagagcuaugcuguuuug

SEQ ID NO: 1410 - DNA, 59 bp, Artificial Sequence
  Synthetic oligonucleotide
caaaacagcatagctctaaaacctatcgccatcggcattgcctatagtgagtcgtatta

SEQ ID NO: 1411 - RNA, 42 nt, Artificial Sequence
  Synthetic oligonucleotide
ggcaaugccgauggcgauagguuuuagagcuaugcuguuuug

SEQ ID NO: 1412 - DNA, 59 bp, Artificial Sequence
  Synthetic oligonucleotide
caaaacagcatagctctaaaactgttggtgttctttcacacctatagtgagtcgtatta

SEQ ID NO: 1413 - RNA, 42 nt, Artificial Sequence
  Synthetic oligonucleotide
ggugugaaagaacaccaacaguuuuagagcuaugcuguuuug

SEQ ID NO: 1414 - RNA, 42 nt, Artificial Sequence; identical to SEQ ID NO: 280
  Synthetic oligonucleotide

SEQ ID NO: 1415 - DNA, 90 bp, Artificial Sequence
  Synthetic oligonucleotide
aaaaagcaccgactcggtgccactttttcaagttgataacggactagccttattttaacttgctatgctgtcctatagtgagtcgtatta

SEQ ID NO: 1416 - RNA, 73 nt, Artificial Sequence
  Synthetic oligonucleotide
ggacagcauagcaaguuaaaauaaggcuaguccguuaucaacuugaaaaaguggcaccgagucggugcuuuuu

SEQ ID NO: 1417 - DNA, 55 bp, Artificial Sequence
  Synthetic oligonucleotide
agcagaaatctctgctgacgcataaagatgagacgctggagtacaaacgtcagct

SEQ ID NO: 1418 - DNA, 55 bp, Artificial Sequence
  Synthetic oligonucleotide
agctgacgtttgtactccagcgtctcatctttatgcgtcagcagagatttctgct

SEQ ID NO: 1419 - DNA, 55 bp, Artificial Sequence
  Synthetic oligonucleotide
gagtggaaggatgccagtgataagtggaatgccatgtgggctgtcaaaattgagc

SEQ ID NO: 1420 - DNA, 55 bp, Artificial Sequence
  Synthetic oligonucleotide
gctcaattttgacagcccacatggcattccacttatcactggcatccttccactc

SEQ ID NO: 1421 - DNA, 55 bp, Artificial Sequence
  Synthetic oligonucleotide
aacgtgctgcggctggctggtgaacttccgatagtgcgggtgttgaatgatttcc

SEQ ID NO: 1422 - DNA, 55 bp, Artificial Sequence
  Synthetic oligonucleotide
ggaaatcattcaacacccgcactatcggaagttcaccagccagccgcagcacgtt

SEQ ID NO: 1423 - DNA, 55 bp, Artificial Sequence
  Synthetic oligonucleotide
tcacaacaatgagtggcagatatagcctggtggttcaggcggcgcatttttattg

SEQ ID NO: 1424 - DNA, 55 bp, Artificial Sequence
  Synthetic oligonucleotide
caataaaaatgcgccgcctgaaccaccaggctatatctgccactcattgttgtga

SEQ ID NO: 1425 - DNA, 55 bp, Artificial Sequence
  Synthetic oligonucleotide
gaatgaacgatgcagaggcaatgccgatggcgatagtgggtatcatgtagccgct

SEQ ID NO: 1426 - DNA, 55 bp, Artificial Sequence
  Synthetic oligonucleotide
agcggctacatgatacccactatcgccatcggcattgcctctgcatcgttcattc

SEQ ID NO: 1427 - DNA, 55 bp, Artificial Sequence
  Synthetic oligonucleotide
aatcgatggtgtctccggtgtgaaagaacaccaacaggggtgttaccactaccgc

SEQ ID NO: 1428 - DNA, 55 bp, Artificial Sequence
  Synthetic oligonucleotide
gcggtagtggtaacacccctgttggtgttctttcacaccggagacaccatcgatt

SEQ ID NO: 1429 - DNA, 35 bp, Artificial Sequence
  Synthetic oligonucleotide
aattgaaagtgataagtggaatgccatgtggaaac

SEQ ID NO: 1430 - DNA, 35 bp, Artificial Sequence
  Synthetic oligonucleotide
gatcgtttccacatggcattccacttatcactttc

SEQ ID NO: 1431 - DNA, 55 bp, Artificial Sequence
  Synthetic oligonucleotide
agcagaaatctctgctgacgcataaagatgagacgctcgagtacaaacgtcagct

SEQ ID NO: 1432 - DNA, 55 bp, Artificial Sequence
  Synthetic oligonucleotide
agctgacgtttgtactcgagcgtctcatctttatgcgtcagcagagatttctgct

SEQ ID NO: 1433 - DNA, 55 bp, Artificial Sequence
  Synthetic oligonucleotide
agctgcataacgcgaaaaaatatatttatctgcttgatcttcaaatgttgtattg

SEQ ID NO: 1434 - DNA, 55 bp, Artificial Sequence
  Synthetic oligonucleotide
caatacaacatttgaagatcaagcagataaatatattttttcgcgttatgcagct

SEQ ID NO: 1435 - DNA, 55 bp, Artificial Sequence
  Synthetic oligonucleotide
agcagaaatctctgctctgcgtatttctactctgcgtggagtacaaacgtcagct

SEQ ID NO: 1436 - DNA, 55 bp, Artificial Sequence
  Synthetic oligonucleotide
agctgacgtttgtactccacgcagagtagaaatacgcagagcagagatttctgct

SEQ ID NO: 1437 - DNA, 55 bp, Artificial Sequence
  Synthetic oligonucleotide
agctgcataacgcgggaaaatccatttatctgcttgatcttcggatgttccattg

SEQ ID NO: 1438 - DNA, 55 bp, Artificial Sequence
  Synthetic oligonucleotide
caatggaacatccgaagatcaagcagataaatggattttcccgcgttatgcagct

SEQ ID NO: 1439 - DNA, 55 bp, Artificial Sequence
  Synthetic oligonucleotide
ggctgcaccacgcgggaaaatccatttaggtgcttcctcttcggatgttccattg

SEQ ID NO: 1440 - DNA, 55 bp, Artificial Sequence
  Synthetic oligonucleotide
caatggaacatccgaagaggaagcacctaaatggattttcccgcgtggtgcagcc

SEQ ID NO: 1441 - DNA, 55 bp, Artificial Sequence
  Synthetic oligonucleotide
ggctggaccacgcgggaaaatccacctaggtggttcctcttcggatgttccatcc

SEQ ID NO: 1442 - DNA, 55 bp, Artificial Sequence
  Synthetic oligonucleotide
ggatggaacatccgaagaggaaccacctaggtggattttcccgcgtggtccagcc

SEQ ID NO: 1443 - DNA, 55 bp, Artificial Sequence
  Synthetic oligonucleotide
agcagaaatctctgctctgcgtatttctactcacgctggagtacaaacgtcagct

SEQ ID NO: 1444 - DNA, 55 bp, Artificial Sequence
  Synthetic oligonucleotide
agctgacgtttgtactccagcgtgagtagaaatacgcagagcagagatttctgct

SEQ ID NO: 1445 - DNA, 55 bp, Artificial Sequence
  Synthetic oligonucleotide
agcagaaatctctgctctgcgtatttcttgagacgctggagtacaaacgtcagct

SEQ ID NO: 1446 - DNA, 55 bp, Artificial Sequence
  Synthetic oligonucleotide
agctgacgtttgtactccagcgtctcaagaaatacgcagagcagagatttctgct

SEQ ID NO: 1447 - DNA, 55 bp, Artificial Sequence
  Synthetic oligonucleotide
agcagaaatctctgctctgcgtataagatgagacgctggagtacaaacgtcagct

SEQ ID NO: 1448 - DNA, 55 bp, Artificial Sequence
  Synthetic oligonucleotide
agctgacgtttgtactccagcgtctcatcttatacgcagagcagagatttctgct

SEQ ID NO: 1449 - DNA, 55 bp, Artificial Sequence
  Synthetic oligonucleotide
agcagaaatctctgctctgccataaagatgagacgctggagtacaaacgtcagct

SEQ ID NO: 1450 - DNA, 55 bp, Artificial Sequence
  Synthetic oligonucleotide
agctgacgtttgtactccagcgtctcatctttatggcagagcagagatttctgct

SEQ ID NO: 1451 - DNA, 55 bp, Artificial Sequence
  Synthetic oligonucleotide
agcagaaatctctgctgacggtataagatgagacgctggagtacaaacgtcagct

SEQ ID NO: 1452 - DNA, 55 bp, Artificial Sequence
  Synthetic oligonucleotide
agctgacgtttgtactccagcgtctcatcttataccgtcagcagagatttctgct

SEQ ID NO: 1453 - DNA, 55 bp, Artificial Sequence
  Synthetic oligonucleotide
agcagaaatctctgctgacgcatattcttgagacgctggagtacaaacgtcagct

SEQ ID NO: 1454 - DNA, 55 bp, Artificial Sequence
  Synthetic oligonucleotide
agctgacgtttgtactccagcgtctcaagaatatgcgtcagcagagatttctgct

SEQ ID NO: 1455 - DNA, 55 bp, Artificial Sequence
  Synthetic oligonucleotide
agcagaaatctctgctgacgcataaagaactcacgctggagtacaaacgtcagct

SEQ ID NO: 1456 - DNA, 55 bp, Artificial Sequence
  Synthetic oligonucleotide
agctgacgtttgtactccagcgtgagttctttatgcgtcagcagagatttctgct

SEQ ID NO: 1457 - DNA, 55 bp, Artificial Sequence
  Synthetic oligonucleotide
agcagaaatctctgctgacgcataaagatgagtgcgtggagtacaaacgtcagct

SEQ ID NO: 1458 - DNA, 55 bp, Artificial Sequence
  Synthetic oligonucleotide
agctgacgtttgtactccacgcactcatctttatgcgtcagcagagatttctgct

SEQ ID NO: 1459 - DNA, 55 bp, Artificial Sequence
  Synthetic oligonucleotide
agcagaaatctctgctgacgcataaagatgagaccgtggagtacaaacgtcagct

SEQ ID NO: 1460 - DNA, 55 bp, Artificial Sequence
  Synthetic oligonucleotide
agctgacgtttgtactccacggtctcatctttatgcgtcagcagagatttctgct

SEQ ID NO: 1461 - DNA, 55 bp, Artificial Sequence; identical to SEQ ID NO: 1417
  Synthetic oligonucleotide

SEQ ID NO: 1462 - DNA, 55 bp, Artificial Sequence; identical to SEQ ID NO: 1418
  Synthetic oligonucleotide

SEQ ID NO: 1463 - DNA, 55 bp, Artificial Sequence; identical to SEQ ID NO: 1419
  Synthetic oligonucleotide

SEQ ID NO: 1464 - DNA, 55 bp, Artificial Sequence; identical to SEQ ID NO: 1420
  Synthetic oligonucleotide

SEQ ID NO: 1465 - DNA, 55 bp, Artificial Sequence; identical to SEQ ID NO: 1420
  Synthetic oligonucleotide

SEQ ID NO: 1466 - DNA, 19 bp, Artificial Sequence
  Synthetic oligonucleotide
tgggctgtcaaaattgagc

SEQ ID NO: 1467 - DNA, 72 bp, Artificial Sequence
  Synthetic oligonucleotide
ttcgaaagagtggaaggatgccagtgataagtggaatgccatgtgggctgtcaaaattgagcagaccaaaga

SEQ ID NO: 1468 - DNA, 72 bp, Artificial Sequence
  Synthetic oligonucleotide
tctttggtctgctcaattttgacagcccacatggcattccacttatcactggcatccttccactctttcgaa

SEQ ID NO: 1469 - DNA, 26 bp, Artificial Sequence
  Synthetic oligonucleotide
gctgtcaaaattgagcagaccaaaga

SEQ ID NO: 1470 - DNA, 29 bp, Artificial Sequence
  Synthetic oligonucleotide
tgggctgtcaaaattgagcagaccaaaga

SEQ ID NO: 1471 - DNA, 11 bp, Artificial Sequence
  Synthetic oligonucleotide
tgggctgtcaa

SEQ ID NO: 1472 - RNA, 37 nt, Artificial Sequence
  Synthetic oligonucleotide
uugacagcccacauggcauuccacuuaucacuggcau

SEQ ID NO: 1473 - DNA, 27 bp, Artificial Sequence
  Synthetic oligonucleotide
atgaccctaggggctcccccctgcaaa

SEQ ID NO: 1474 - DNA, 27 bp, Artificial Sequence
  Synthetic oligonucleotide
  modified_base (2)..(2): The N at this position is a U that is 2' O methylated
  misc_feature (2)..(2): n is a, c, g, or t
  modified_base (7)..(7): The C at this position is 2' O methylated
  modified_base (12)..(12): The G at this position is 2' O methylated
  modified_base (17)..(17): The C at this position is 2' O methylated
  modified_base (22)..(22): The N at this position is a U that is 2' O methylated
  misc_feature (22)..(22): n is a, c, g, or t
  modified_base (27)..(27): The A at this position is 2' O methylated
angaccctaggggctccccccngcaaa

SEQ ID NO: 1475 - DNA, 27 bp, Artificial Sequence
  Synthetic oligonucleotide
  modified_base (1)..(1): The A at this position is 2' O methylated
  modified_base (4)..(4): The A at this position is 2' O methylated
  modified_base (8)..(8): The N at this position is a U that is 2' O methylated
  misc_feature (8)..(8): n is a, c, g, or t
  modified_base (12)..(12): The G at this position is 2' O methylated
  modified_base (16)..(16): The C at this position is 2' O methylated
  modified_base (20)..(20): The C at this position is 2' O methylated
  modified_base (24)..(24): The C at this position is 2' O methylated
  modified_base (27)..(27): The A at this position is 2' O methylated
atgacccnaggggctcccccctgcaaa

SEQ ID NO: 1476 - DNA, 27 bp, Artificial Sequence
  Synthetic oligonucleotide
  modified_base (1)..(1): The A at this position is 2' O methylated
  modified_base (4)..(4): The A at this position is 2' O methylated
  modified_base (7)..(7): The C at this position is 2' O methylated
  misc_feature (8)..(8): The N at this position is a U
  modified_base (9)..(9): The A at this position is 2' O methylated
  modified_base (12)..(12): The G at this position is 2' O methylated
  modified_base (15)..(15): The N at this position is a U that is 2' O methylated
  misc_feature (15)..(15): n is a, c, g, or t
  modified_base (18)..(18): The C at this position is 2' O methylated
  modified_base (21)..(21): The C at this position is 2' O methylated
  modified_base (24)..(24): The C at this position is 2' O methylated
  modified_base (27)..(27): The A at this position is 2' O methylated
atgacccnaggggcncccccctgcaaa

SEQ ID NO: 1477 - DNA, 27 bp, Artificial Sequence
  Synthetic oligonucleotide
  modified_base (1)..(1): The A at this position is 2' O methylated
  modified_base (3)..(3): The G at this position is 2' O methylated
  modified_base (5)..(5): The C at this position is 2' O methylated
  modified_base (7)..(7): The C at this position is 2' O methylated
  modified_base (9)..(9): The A at this position is 2' O methylated
  modified_base (12)..(12): The G at this position is 2' O methylated
  modified_base (14)..(14): The C at this position is 2' O methylated
  modified_base (16)..(16): The C at this position is 2' O methylated
  modified_base (18)..(18): The C at this position is 2' O methylated
  modified_base (20)..(20): The C at this position is 2' O methylated
  modified_base (22)..(22): The N at this position is a U that is 2' O methylated
  misc_feature (22)..(22): n is a, c, g, or t
  modified_base (24)..(24): The C at this position is 2' O methylated
  modified_base (26)..(26): The A at this position is 2' O methylated
atgaccctaggggctccccccngcaaa

SEQ ID NO: 1478 - DNA, 27 bp, Artificial Sequence
  Synthetic oligonucleotide
  modified_base (1)..(1): The A at this position is 2' O methylated
  modified_base (3)..(3): The G at this position is 2' O methylated
  modified_base (5)..(5): The C at this position is 2' O methylated
  modified_base (7)..(7): The C at this position is 2' O methylated
  modified_base (9)..(9): The A at this position is 2' O methylated
  modified_base (11)..(11): The G at this position is 2' O methylated
  modified_base (13)..(13): The G at this position is 2' O methylated
  modified_base (15)..(15): The N at this position is a U that is 2' O methylated
  misc_feature (15)..(15): n is a, c, g, or t
  modified_base (17)..(17): The C at this position is 2' O methylated
  modified_base (19)..(19): The C at this position is 2' O methylated
  modified_base (21)..(21): The C at this position is 2' O methylated
  modified_base (23)..(23): The G at this position is 2' O methylated
  modified_base (25)..(25): The A at this position is 2' O methylated
  modified_base (27)..(27): The A at this position is 2' O methylated
atgaccctaggggcncccccctgcaaa

SEQ ID NO: 1479 - DNA, 141 bp, Artificial Sequence
  Synthetic oligonucleotide
taatacgactcactataggtgataagtggaatgccatggttttagagctatgctgttttggaaacaaaacagcatagcaagttaaaataaggctagtccgttatcaacttgaaaaagtggcaccgagtcggtgcttttttt

SEQ ID NO: 1480 - RNA, 124 nt, Artificial Sequence
  Synthetic oligonucleotide
ggugauaaguggaaugccaugguuuuagagcuaugcuguuuuggaaacaaaacagcauagcaaguuaaaauaaggcuaguccguuaucaacuugaaaaaguggcaccgagucggugcuuuuuuu

SEQ ID NO: 1481 - DNA, 55 bp, Artificial Sequence; identical to SEQ ID NO: 1420
  Synthetic oligonucleotide

SEQ ID NO: 1482 - DNA, 73 bp, Artificial Sequence
  Synthetic oligonucleotide
gagtggaaggatgccagtgataagtggaatgccatgtgggctgtcaaaattgagcctatagtgagtcgtatta

SEQ ID NO: 1483 - RNA, 56 nt, Artificial Sequence
  Synthetic oligonucleotide
ggcucaauuuugacagcccacauggcauuccacuuaucacuggcauccuuccacuc

SEQ ID NO: 1484 - DNA, 73 bp, Artificial Sequence
  Synthetic oligonucleotide
gctcaattttgacagcccacatggcattccacttatcactggcatccttccactcctatagtgagtcgtatta

SEQ ID NO: 1485 - DNA, 56 bp, Artificial Sequence
  Synthetic oligonucleotide
ggagtggaaggatgccagtgataagtggaatgccatgtgggctgtcaaaattgagc

SEQ ID NO: 1486 - DNA, 18 bp, Artificial Sequence
  Synthetic oligonucleotide
gggctgtcaaaattgagc

SEQ ID NO: 1487 - DNA, 19 bp, Artificial Sequence
  Synthetic oligonucleotide
accgctgtcaaaattgagc

SEQ ID NO: 1488 - RNA, 18 nt, Artificial Sequence
  Synthetic oligonucleotide
gggcugucaaaauugagc

SEQ ID NO: 1489 - DNA, 10 bp, Artificial Sequence
  Synthetic oligonucleotide
tgggctgtca

SEQ ID NO: 1490 - DNA, 15 bp, Artificial Sequence
  Synthetic oligonucleotide
tgggctgtcaaaatt

SEQ ID NO: 1491 - DNA, 72 bp, Artificial Sequence
  Synthetic oligonucleotide
aacgtgctgcggctggctggtgaacttccgatagtgcgggtgttgaatgatttcctatagtgagtcgtatta

SEQ ID NO: 1492 - RNA, 55 nt, Artificial Sequence
  Synthetic oligonucleotide
ggaaaucauucaacacccgcacuaucggaaguucaccagccagccgcagcacguu

SEQ ID NO: 1493 - DNA, 74 bp, Artificial Sequence
  Synthetic oligonucleotide
tcacaacaatgagtggcagatatagcctggtggttcaggcggcgcatttttattgcctatagtgagtcgtatta

SEQ ID NO: 1494 - RNA, 57 nt, Artificial Sequence
  Synthetic oligonucleotide
ggcaauaaaaaugcgccgccugaaccaccaggcuauaucugccacucauuguuguga

SEQ ID NO: 1495 - DNA, 19 bp, Artificial Sequence
  Synthetic oligonucleotide
cgggtgttgaatgatttcc

SEQ ID NO: 1496 - DNA, 19 bp, Artificial Sequence
  Synthetic oligonucleotide
aggcggcgcatttttattg

SEQ ID NO: 1497 - DNA, 21 bp, Artificial Sequence
  Synthetic oligonucleotide
tgtgggctgtcaaaattgagc

SEQ ID NO: 1498 - DNA, 21 bp, Artificial Sequence
  Synthetic oligonucleotide
tgcgggtgttgaatgatttcc

SEQ ID NO: 1499 - DNA, 24 bp, Artificial Sequence
  Synthetic oligonucleotide
ccatgtgggctgtcaaaattgagc

SEQ ID NO: 1500 - DNA, 24 bp, Artificial Sequence
  Synthetic oligonucleotide
tagtgcgggtgttgaatgatttcc

SEQ ID NO: 1501 - DNA, 27 bp, Artificial Sequence
  Synthetic oligonucleotide
atgccatgtgggctgtcaaaattgagc

SEQ ID NO: 1502 - DNA, 27 bp, Artificial Sequence
  Synthetic oligonucleotide
cgatagtgcgggtgttgaatgatttcc

SEQ ID NO: 1503 - DNA, 30 bp, Artificial Sequence
  Synthetic oligonucleotide
ggaatgccatgtgggctgtcaaaattgagc

SEQ ID NO: 1504 - DNA, 30 bp, Artificial Sequence
  Synthetic oligonucleotide
ttccgatagtgcgggtgttgaatgatttcc

SEQ ID NO: 1505 - DNA, 33 bp, Artificial Sequence
  Synthetic oligonucleotide
agtggaatgccatgtgggctgtcaaaattgagc

SEQ ID NO: 1506 - DNA, 33 bp, Artificial Sequence
  Synthetic oligonucleotide
aacttccgatagtgcgggtgttgaatgatttcc

SEQ ID NO: 1507 - DNA, 36 bp, Artificial Sequence
  Synthetic oligonucleotide
ataagtggaatgccatgtgggctgtcaaaattgagc

SEQ ID NO: 1508 - DNA, 39 bp, Artificial Sequence
  Synthetic oligonucleotide
gtgataagtggaatgccatgtgggctgtcaaaattgagc

SEQ ID NO: 1509 - DNA, 39 bp, Artificial Sequence
  Synthetic oligonucleotide
ctggtgaacttccgatagtgcgggtgttgaatgatttcc

SEQ ID NO: 1510 - DNA, 55 bp, Artificial Sequence
  Synthetic oligonucleotide
gagtggaaggatgccagtgataagtggaatgccatgaccgctgtcaaaattgagc

SEQ ID NO: 1511 - DNA, 55 bp, Artificial Sequence
  Synthetic oligonucleotide
gctcaattttgacagcggtcatggcattccacttatcactggcatccttccactc

SEQ ID NO: 1512 - DNA, 73 bp, Artificial Sequence
  Synthetic oligonucleotide
gagtggaaggatgccagtgataagtggaatgccatgaccgctgtcaaaattgagcctatagtgagtcgtatta

SEQ ID NO: 1513 - RNA, 56 nt, Artificial Sequence
  Synthetic oligonucleotide
  misc_feature (40)..(40): n is t
ggcucaauuuugacagcggucauggcauuccacuuaucacuggcauccuuccacuc

SEQ ID NO: 1514 - DNA, 19 bp, Artificial Sequence
  Synthetic oligonucleotide
  modified_base (1)..(1): The N at this position is a U that is 2' O methylated
  misc_feature (1)..(1): n is a, c, g, or t
  modified_base (19)..(19): The C at this position is 2' O methylated
ngggctgtcaaaattgagc

SEQ ID NO: 1515 - DNA, 19 bp, Artificial Sequence
  Synthetic oligonucleotide
  misc_feature (1)..(2): phosphorothioate bond between t and g
  misc_feature (18)..(19): phosphorothioate bond between g and c
tgggctgtcaaaattgagc

SEQ ID NO: 1516 - DNA, 19 bp, Artificial Sequence
  Synthetic oligonucleotide
  modified_base (1)..(1): n is 2'-F ribose uridine
  misc_feature (1)..(1): n is a, c, g, or t
  modified_base (19)..(19): c is 2'-F ribose cytidine
ngggctgtcaaaattgagc

SEQ ID NO: 1517 - DNA, 19 bp, Artificial Sequence
  Synthetic oligonucleotide
  modified_base (1)..(1): The T at this position is a locked nucleic acid (LNA)
  modified_base (19)..(19): The C at this position is a locked nucleic acid (LNA)
tgggctgtcaaaattgagc

SEQ ID NO: 1518 - DNA, 19 bp, Artificial Sequence
  Synthetic oligonucleotide
  modified_base (1)..(1): The N at this position is a U that is 2' O methylated
  misc_feature (1)..(1): n is a, c, g, or t
  modified_base (6)..(6): The N at this position is a U that is 2' O methylated
  misc_feature (6)..(6): n is a, c, g, or t
  modified_base (11)..(11): The A at this position is 2' O methylated
  modified_base (16)..(16): The G at this position is 2' O methylated
  modified_base (19)..(19): The C at this position is 2' O methylated
ngggcngtcaaaattgagc

SEQ ID NO: 1519 - DNA, 130 bp, Artificial Sequence
  Synthetic oligonucleotide
taatacgactcactataggggcagagatgatgaccctgtttaagagctatgctggaaacagcatagcaagtttaaataaggctagtccgttatcaacttgaaaaagtggcaccgagtcggtgcttttttt

SEQ ID NO: 1520 - RNA, 113 nt, Artificial Sequence
  Synthetic oligonucleotide
ggggcagagaugaugacccuguuuaagagcuaugcuggaaacagcauagcaaguuuaaauaaggcuaguccguuaucaacuugaaaaaguggcaccgagucggugcuuuuuuu

SEQ ID NO: 1521 - DNA, 132 bp, Artificial Sequence
  Synthetic oligonucleotide
taatacgactcactataggccaaagttgtcatggatgacgtttaagagctatgctggaaacagcatagcaagtttaaataaggctagtccgttatcaacttgaaaaagtggcaccgagtcggtgcttttttt

SEQ ID NO: 1522 - RNA, 115 nt, Artificial Sequence
  Synthetic oligonucleotide
ggccaaaguugucauggaugacguuuaagagcuaugcuggaaacagcauagcaaguuuaaauaaggcuaguccguuaucaacuugaaaaaguggcaccgagucggugcuuuuuuu

SEQ ID NO: 1523 - RNA, 115 nt, Artificial Sequence
  Synthetic oligonucleotide
ggaugucaucauauuuggcaggguuuaagagcuaugcuggaaacagcauagcaaguuuaaauaaggcuaguccguuaucaacuugaaaaaguggcaccgagucggugcuuuuuuu

SEQ ID NO: 1524 - DNA, 132 bp, Artificial Sequence
  Synthetic oligonucleotide
taatacgactcactataggatgtcatcatatttggcagggtttaagagctatgctggaaacagcatagcaagtttaaataaggctagtccgttatcaacttgaaaaagtggcaccgagtcggtgcttttttt

SEQ ID NO: 1525 - DNA, 115 bp, Artificial Sequence
  Synthetic oligonucleotide
ggatgtcatcatatttggcagggtttaagagctatgctggaaacagcatagcaagtttaaataaggctagtccgttatcaacttgaaaaagtggcaccgagtcggtgcttttttt

SEQ ID NO: 1526 - DNA, 27 bp, Artificial Sequence
  Synthetic oligonucleotide
atgacccttggggctcccccctgcaaa

SEQ ID NO: 1527 - DNA, 27 bp, Artificial Sequence
  Synthetic oligonucleotide
tggatgaccggggccaggggtgctaag

SEQ ID NO: 1528 - DNA, 27 bp, Artificial Sequence
  Synthetic oligonucleotide
ttggcaggtggttctagacggcaggtc

SEQ ID NO: 1529 - DNA, 27 bp, Artificial Sequence
  Synthetic oligonucleotide
ccccagcgtggaaggtggaggagtggg

SEQ ID NO: 1530 - DNA, 27 bp, Artificial Sequence
  Synthetic oligonucleotide
  modified_base (1)..(1): The A at this position is 2' O methylated
  modified_base (3)..(3): The G at this position is 2' O methylated
  modified_base (5)..(5): The C at this position is 2' O methylated
  modified_base (7)..(7): The C at this position is 2' O methylated
  modified_base (9)..(9): The A at this position is 2' O methylated
  modified_base (11)..(11): The G at this position is 2' O methylated
  modified_base (13)..(13): The G at this position is 2' O methylated
  modified_base (15)..(15): The T at this position is 2' O methylated
  modified_base (17)..(17): The C at this position is 2' O methylated
  modified_base (19)..(19): The C at this position is 2' O methylated
  modified_base (21)..(21): The C at this position is 2' O methylated
  misc_feature (22)..(22): n is a, c, g, or t
  modified_base (23)..(23): The G at this position is 2' O methylated
  modified_base (25)..(25): The A at this position is 2' O methylated
  modified_base (27)..(27): The A at this position is 2' O methylated
atgaccctaggggctccccccngcaaa

SEQ ID NO: 1531 - DNA, 21 bp, Artificial Sequence
  Synthetic oligonucleotide
ctcactgttctctccctccgc

SEQ ID NO: 1532 - DNA, 20 bp, Artificial Sequence
  Synthetic oligonucleotide
aggggtctacatggcaactg

SEQ ID NO: 1533 - DNA, 20 bp, Artificial Sequence
  Synthetic oligonucleotide
agaaaatctggcaccacacc

SEQ ID NO: 1534 - DNA, 20 bp, Artificial Sequence
  Synthetic oligonucleotide
ggagtacttgcgctcaggag

SEQ ID NO: 1535 - RNA, 86 nt, Streptococcus mutans
aaacaacacagcaaguuaaauaaggcagugauuuuuaauccaguccguacacaacuugaaaaagugcgcaccgauucggugcuuuu

SEQ ID NO: 1536 - RNA, 25 nt, Streptococcus mutans
agcaaguuaaaauaaggcuaguccg

SEQ ID NO: 1537 - RNA, 71 nt, Streptococcus thermophilus
aaacaacacagcgaguuaaauaaggcuuaguccguacucaacuugaaaagguggcaccgauucgguguuuu

SEQ ID NO: 1538 - RNA, 26 nt, Streptococcus thermophilus
cagcgaguuaaauaaggcuuaguccg

SEQ ID NO: 1539 - RNA, 82 nt, Streptococcus thermophilus
aaaucuugcagaagcuacaaagauaaggcuucaugccgaaaucaacacccugucauuuuauggcaggguguuuucguuauuu

SEQ ID NO: 1540 - RNA, 29 nt, Streptococcus thermophilus
agaagcuacaaagauaaggcuucaugccg

SEQ ID NO: 1541 - RNA, 95 nt, Neisseria meningitidis
aaaugagaaccguugcuacaauaaggccgucugaaaagaugugccgcaacgcucugccccuuaaagcuucugcuuuaaggggcaucguuuauuuc

SEQ ID NO: 1542 - RNA, 35 nt, Neisseria meningitidis
guugcuacaauaaggccgucugaaaagaugugccg

SEQ ID NO: 1543 - RNA, 89 nt, Pasteurella multocida
aaaugagagaguugcuacaauaaggcuucugaaaagaaugaccguaacgcucugccccuugugauucuuaauugcaaggggcaucguuu

SEQ ID NO: 1544 - RNA, 37 nt, Pasteurella multocida
agaguugcuacaauaaggcuucugaaaagaaugaccg

SEQ ID NO: 1545 - DNA, 18 bp, Artificial Sequence
  Synthetic nucleic acid sequence
  misc_feature (1)..(1): The G at this position is 2' O methylated
  misc_feature (2)..(2): The G at this position is 2' O methylated
  misc_feature (3)..(3): The G at this position is 2' O methylated
  misc_feature (4)..(4): The C at this position is 2' O methylated
  misc_feature (5)..(5): The N at this position is a U that is 2' O methylated
  misc_feature (6)..(6): The G at this position is 2' O methylated
  misc_feature (7)..(7): The N at this position is a U that is 2' O methylated
  misc_feature (8)..(8): The C at this position is 2' O methylated
  misc_feature (9)..(9): The A at this position is 2' O methylated
  misc_feature (10)..(10): The A at this position is 2' O methylated
gggcngncaaaattgagc

SEQ ID NO: 1546 - DNA, 18 bp, Artificial Sequence
  Synthetic nucleic acid sequence
  misc_feature (1)..(10): The linkages between the nucleotides at these positions are phosphorothioate linkages
gggctgtcaaaattgagc

SEQ ID NO: 1547 - DNA, 19 bp, Artificial Sequence
  Synthetic nucleic acid sequence
  misc_feature (1)..(2): The linkage between the nucleotides at these positions is a phosphorothioate linkage
  misc_feature (18)..(19): The linkage between the nucleotides at these positions is a phosphorothioate linkage
tgggctgtcaaaattgagc

SEQ ID NO: 1548 - DNA, 18 bp, Artificial Sequence
  Synthetic nucleic acid sequence
  misc_feature (1)..(3): The G nucleotides at these positions are 2' Fluoro modified
  misc_feature (4)..(4): The C nucleotide at this position is 2' Fluoro modified
  misc_feature (4)..(4): The C nucleotide at this position is 2' Fluoro modified
  misc_feature (5)..(5): The T nucleotide at this position is 2' Fluoro modified
  misc_feature (6)..(6): The G nucleotide at this position is 2' Fluoro modified
  misc_feature (7)..(7): The T nucleotide at this position is 2' Fluoro modified
  misc_feature (8)..(8): The C nucleotide at this position is 2' Fluoro modified
  misc_feature (9)..(10): The A nucleotides at these positions are 2' Fluoro modified
gggctgtcaaaattgagc

SEQ ID NO: 1549 - DNA, 18 bp, Artificial Sequence
  Synthetic nucleic acid sequence
  misc_feature (1)..(3): The G nucleotides at these positions are locked nucleic acids (LNA)
  misc_feature (7)..(7): The T nucleotide at this position is a locked nucleic acid (LNA)
  misc_feature (8)..(8): The C nucleotide at this position is a locked nucleic acid (LNA)
  misc_feature (9)..(9): The A nucleotide at this position is a locked nucleic acid (LNA)
gggctgtcaaaattgagc

SEQ ID NO: 1550 - DNA, 19 bp, Artificial Sequence
  Synthetic nucleic acid sequence
  misc_feature (1)..(1): The N at this position is a U nucleotide that is 2' Fluoro modified
  misc_feature (19)..(19): The C nucleotide at this position is 2' Fluoro modified
ngggctgtcaaaattgagc

SEQ ID NO: 1551 - DNA, 19 bp, Artificial Sequence
  Synthetic nucleic acid sequence
  misc_feature (1)..(1): The T nucleotide at this position is a locked nucleic acid (LNA)
  misc_feature (19)..(19): The C nucleotide at this position is a locked nucleic acid (LNA)
tgggctgtcaaaattgagc
